United States Patent Application Publication US 2019/0259469 A1 - sequence listing, part 3

SEQ ID NO: 2 - DNA, 4857450 bp, Salmonella typhimurium (residues 3,238,301-4,857,450 of 4,857,450)
cggggcacccgggtgaccggacttggctttctgtactgcgtccatgctcagcgcacgaatagcattggcaagctctttacgtgaggacattttgactccagatcggatgttgaaaggccatgcccgtaacgacttgacgacagcgcgttttgggctacgccggaaaatttgccaacaatttaccccaagccgcgcgtcatgtacatggaacatccttttaccgcttcagaaatctccggatcatgctcgtatgttgcgcaattagctaacttgcctgccatgcttttctttatacttaacccaggcgctaattcatctgcaacgggcgcatttcaaaataatattgattcgtatggaagagaaaaatgaaaattcgcgctttactgcttgctttgggcatggcgacggtgctgaccggttgccagaatatggactctaatggactgctttcttcgggcgctgaagcttttcaggcctatacgttaagcgatgcgcaggtaaaagcgttgagcgatcaatcctgtcaagagctcgacagtaaagcgaaaatcgcgccggcgagcagcgaatacactaaacgactggcaaaaattgccgccgcgctgggggataacattaacggccagccggtgaactataaggtttacgagacgaaagacgtcaacgcgtttgccatggcgaacggttgtatccgcgtctacagcggactgatggatatgatgaccgacaacgaagttgaagccgtgatcggccatgaaatgggccatgtcgcgctgggtcatgtaaagaaagggatgcaggtcgcgctgggcactaacgccgttcgtgttgcggcggcatcggcaggaggcgtagtcggcagcctgtcgcaatcacagcttggcgatcttggcgaaaaactggtgaactcgcagttctctcagcgtcaggagtccgaagcggatgattattcttacgatctgttgcgcaaacgcggtatcagtccggcaggactcgccaccagctttgagaaactggcaaaactggaagcgggtcgtcaaagctcgatgttcgacgatcacccggcgtccgccgcacgcgcacagcatgtgcgcgatcgtatgagcgcggacgggatcaaataatccccgaacagtgccggatggcggcgtgaacgccttatccggcctacaagcatcaatcagctgtaggccggataagcgcagcgccatccggcaaaacaacttactcgcccttcttcgccgcctggatatagagcatttctaatgccagcgtcgcggccgccagagcggtgatctccgactgatcgtaagccggcgcgacttccactacatccataccgacaatgttcagatctttcagaccgcgtaccagtttaatggcgcgatcggaggtcaaaccgccgatcaccggcgtaccggtgccaggcgcaaacgccgggtccagacagtcgatatcaaaggtcagatagaccggcatatcgccgacgatctgtttcacctgagcgagaatatcatccacgccgcgatcgttgacctggcaggcatccagcacggtaaagccattgtctttgtcaaactcagtacgaataccgatctgtaccgaatgatgcggatcgatcaggccttctttcggcgcggtgtagaacatcgtgccgtgatcgaattcgcagccgttagcgtaggtatcggtatgcgcatcaaaatgtaccagcgccattttgccaaaatgtttcgcgtgggcgcgcagcagcggcagcgtgacgaagtggtcgccgccgaaagagagcatacgcttgcctgcagacagcagtttttcagcgtgcgcctgtaatttttcgctcatttcacgggcatcgccaaacgcatacaccaaatcgccgcagtccacgacgttcaggcgctcgcgcatgtcaaaattccacgggaaacggtgatgttcccaggcaaggttggtcgacacctgacggatcgccgccgggccatgacggccgccagcgcgaccggacgttgccatatcaaacggtacgccagtgatcacccagtcggcatcgctgtcatacggctggaagttcattggcagacgtaaaaaaccaaacgcattagaaaccagtgagttatcgtactgatgacctaaggtgctcatggcaaaaacctcttcttagtcaatataaaaaaaccctcccgcgtcgttaggcccgacgaggaagggtttgaatttgtttacggctcaaagtttactctgacagaccgcattattgaagtcagtttagccaggtacagtagacaacgcccgaaaaaaatatatatccagcgcaaatcagtaggctcatacgtccatcgcggtcagttaagaggccttagggatttgccgctgtaaaaactcaagcactaatgcgtaaaacagcggtgtttttcctggcgtctggaaaatggcgtgaccgctaccgggaatgagggtcatctccgcctgaggcagcagccggtacagctcggtaacttcttcaacggtgaaaaattcatcccggtcgccgtccagtaatagcacaggaatgtggatttttttcacctcttcttccgccagcgatgtgggcgttgtccacattggccagacacctttgaggaacgtgcgccagtagtctttttgctctggatgatgcatgttctgataaaatttaaccatcccgggcgcatccgaagccattttatccagatcgcgatccgtcaattgcccctgaggcattcctttaccataaaaaatttccatcccctgcatgtaatgggtcgtagcaaagcgatgcgttgcgccgccgacgatagcagcgcgcgctagatccgggtatcggctggttaacttcagaacgaccatgccgccatcgctgtaacccatcaccagcggtttttccagcttcagcgctttaacaaaagccgccatatcttccgtcatcagatcatagctaaacgttccttgcgggttattggttaatccatgtccacgactgtccggcatgatgacgcgaaaatatcgagatgcctctttcgctaatccctgccaacttttcgccgtcagaccaccaccgtgaatcaacagcagcggaggcccctcgccctcttcaacgtaatgaattttgataccattcgcttccacaaatttatctttgtccatcgttgttgctgaagcatttattaaaaatataatattgataataaaaataaatgctaatttaaaaatatgattcataacacctcgccaatcactttccgtgtaaaagaccatattattcagattgaacaaaaataacatcaaaatcgatttgtatcattttcacttatttaccggggagaccccgcatcctctttttacagaacgtaaaaagcctttccgcgattaaccccaacgcgaaaaggctctgaagtcagaaaagtgccaccttattcattctggctgtaattcaggatgacttgaaggtctcttcctgaattgcatttagcgctttctttattccttcgcctgacaagactagcttgactcgctaaatgccgtggccggaattttcacaatcgcttttttaaccggcgcaggtttaccacgcgtacaaagcggacggtggacctggttgggataaaaaagcgcgaaatcgccaggatttaatgtaacgaactgctcattagcgacacattcaggaaagatgatgtcatcaggaagatgctcaagctcctttatcctggtatcaattttgttggaatagccaatctcctcataaccgcttagtaaaatctgaacatcgatatattttttatgaagttcagctttgcggtttaacgaagagtgtgtttctccttcgcttatcataagaaatgactccgggaaagaaagttcatatctaccagcaggctgatcttcagctatcttcaccgcttcgatgataagttttttaataatgtggttaacgtaaggtaataaagtaagctgctctatatttccatatagcatactatagttatcctaaataatggtcgtgattataattatcagccaatcaggtactggtaaataccttcagccacaggaataccttcttttaaacatttttctttataggcgatttgcggatcgtttggcgccagcactttatcaacaccgggcatcggttttacagcccttagctcattgaccattgtgctcattattgaggaaaacagcggattgcccaacatctgcggatcaataacgataaccagactcgctaacttgcgcatcttgtcatagtcgccatacatccgaacaatatggttgctaaagtttgcccccatcaggacgcccgtgagcgcatcaatcgccagggcaataccagaacctttgtgtccgccaaagggcagcagattttcaattttatgcggatcggtagtgatatgtccctctttatccagcgccagaccatgacctattggtttcccggtttctttggcgtgcagaattttaccaaacgcaatggcgctggtcgccatatcgacgatcatcggatggctgtctttaacggggaagccgaaggcgattgggttagtccccagaaagcgctccgcgccgccatacggcgcaacacaggtatccgttcgcgtcatggcgatagccaccattccctggcttgtcgcctgctcaatgaaccacgagagcgcgccgcagtgggacgtatttttgacgctgacgaaacccagccccgtctctctcgccagactaatagcgtgatctgtcgcctttatcagcgcgcagtgtcccattccatcatcagagtccagaatagcgactgaaggcgaaatctgttcgatgctgaatgttgcttttggattgagcccgcctgcgttcaggcgggtacaatagtgctctacgcgaataacgccgtgggagtgaacgccggtaatatcggcatgaaccaaaacgtcggctacctgctgcgccgtttgcgcgtcaagacccgcctgggtgagtttattaaacgccagcgctttcaattcattttctttgactaatattgttgacataactatcccgctattaaaatttgataacgcctttaaccaattttttgttttctaccacgttcttctggtactggttgccgaacgtatagaaatcgaattcctggtttttcatcattgtttcgctaatagcgccctgagccattagctcaatgacacattcgaagtcttcccgcgtcgcgttacggctgctcaatagcgtggtctcttttttatggaaggtcggatcgtcaatgacgagctcgccgatatacagcccgatgaagacgatttttccgccgtgacgaatcagatcgacagcgcggctcatggaggatttattgccggtggcatcaagcacagtgccggctaattcaccggagaaacaggctttcagcgcatcaatatagtcgtctgacgacggatcgagcgttgcaacgcctaccttttcggcgaccagacgacggcgttcggcgtcaatatcagctaccgcgacgcgagcgcctttggcttttgctatcgcggcggcggccagcccaatcggcccggcgccgaccaccacaatgttttgctgcggcttcacgtcagcgcggcgtactgcatgggcgctgatggcgaaacactcaaccagcgcgcccgcgctgtcagtgaggttatccgacagttcaaccagattttgttcacgaacggccagatattcgctaaagccgccgtcctggtgaacaccatacagcgagacgttctcacagcagttggtttttccttcccggcaggctgcgcaagcgccgcaaggaatacagggaataacgctatagcgttggccgaccttcgccgtgctgcacgatttacctaacatttcagccacgccgcaaatttcatgacccagcacgcgcggataggcaaaaaagggctggcgaccggcaaacgcatggatatcggtgccgcaaataccaaccgctttaatttttaacagtacttcatcgtcttttaaatgaggaatatccctttcaatgtattcgatatttcccggattattacagataagcgttttcatacttaaccctttgaagataaacggtgaatggtggccgtgacgccatgtaattcaatatggttaaaggcctgctgaatgttgtttaaaaagtctgcgttgtcgctggccagcgttccaaagatgctatttatctgcagcaaagacagcgcttgttcccatcgcgtgtttttatttttaatagccgcattgaaggtatcattgagcgggtcggccacgctctgcccctgagagagcgtattaatgacgtaatggagccagcccgcaatcagcgtcgctaacgccctgcccttaacaccgcgcgcctggagcgtcagataaggatcgacggcccgctgaggcagcttctgagaaccgtccatcgcaatctgtccggtcttatgtttaatattcgggttgctgaatcgatcaatgagcaactgcgcatattgatgtacatctaccgccaaattcgggcgcagcgattttgcctgctcttccgtcattaaatgatgtacggcggttttaaaagcgtcgtcttccatgcactgatagataaactcatatccggccaggctgccgttataggcgagaaacgaatggctgccattcagcatacgaagtttcatttcttcatagggaagcacgtccgagacgaacatcgcccctgctttatcccagtcaggacgaccggcaacgaaattatcttcgataacccactgacggaaatcctcgcatacgatgccgcagggatcggcaaaaccgatctggtctttaatcatgtcaaattgctctggcgtcattgccggcacgatgcgatcgaccatggtgccaggaaaggtgacatgcttcgctatccaggccgccagttgcggatcgagattatcggcaaacgtaacgatcgccgttttggtcaaatgaccgttttccggaatgttatcgcacgacagtacactaaacgggggaagcccttgctggcggcgtatccgtagcgcttcgacgatcagtccgagtgctgaccggggatgttcaggatcggcaagatcgtgtttgatgagcggatggctgagatcgagcgttctggaccgtggatcggtgcagtaacctttttccgttatcgtcaacgaaacaatttttacctgcggctcagtcagcttctcgatcgccgcctgaatacctgacttcggcgtatgcaacgcgccggtgatggtacgaaccaggcgactattgatggcgctggctgacgtttccaccactgaaaacagcccctgttgcgcatttagcgcatccaccagctccgcatcgccgaacagattcagttcaaaaatcccccagcggttgccggttatctcattcgtgagatcgttataaacagcctgatgaccacggtgaaaggcgccaaatccaatatgtacgatgttggcttccattccctgacgtgaataagtcgttttgaattggtgccttgcggcgtctaactggcgagctatggtgtccatgaatttttcccactcctgttttgtttaccaattctgcttaaacaccataccaaaatccgtgaatatgatcacactcatggcaccagattctttaccatggtatgctgactaatagccaatgaataaaaataatttatttatcaattagttataaaaagcacttctcaggataaattttacgattcacaaaagcgtgattttgattagaaaaatcggccacaaattggcataccacccatacaacccgtaatcattaaaccacatgaaaaacaatatcttattgaataacacgcccgctgcaagtgtatatgtcacgcatgattggttcaataatcacccgaaatacagcaaaccaaacctgataatttgtctagtgaattaatgaactcaatttattatcagcatcaacattaacctaagaacatcagttacggttttgatcatccgggtcgctgctaaagcgatgaggagtgagccgcctttagacgtaattggcaaattaatccattgatttaaaacaggaaaaaattgatgaagacgcggattaggcacgttgaaacaaagctttcaaagcccctctggccgaggtcttagttgacgtgaaacatggcataatagccatttcgaactggtaaccacgacgattacgctggaagacggttcaactggcaccggatatacctataccggcggaaagggagggtatgcaattaaagcgatgatcgaccacgatcttgccccggtactgtcagggaaagaggcgctgcgattgacgatatctatgactttatggaatagcatattcactatgtgggttgcggaggcatcgcgtcgtttgcgatgtctgcgatgtctgcgatgtctgcgatgtctgcggtggatatcgccctttgggatttgaaaggcaaacgtgaaaaactgccgctgtggaaaatggctggttgaaggcggcgcgtctgtcgacgaatagcggtcgtttggtatgctcgctcggtatgcaggaattacacgtcagactggtttccgcattcgagactggctgactggaggttcacagtttcccaatcgatcaatataccaaacatccgctggtggtcgacaattatcgcgccgtggcaccggacacctacggcattggcgtagagtttgactgggataagctgagcgtttacgaagcctgattccctctctccgggcttgtttttggcggcaggcccggttaatcgctgacaaaaatgtcatccgcctgaaaatagccgtcaggtggcgaagaaaaaatcatcaaaatcttccagcgaatcatcctgttggaagatttttaccagctcatttttactgttttcaagatgggtccacgaagcctgtctggcctgctcagcatcgcgtttttgcaatgcaaggaagatactacggtgatcttccacccatttcattcttaactctttcttatgtaaatacttatagtttaactgcttccagcgcggattttcggtcctgacagcccgccacagctcggcagattgtttcattaatacacgattttgcgtggattccgcgatgatattgtggaactggcgatccagttcttcaaatttgtcgctgtcgccgccaatctgcttttcctgctgctcaataatacgtttaagctgcttaagttcattaaatctgatttgcgtagcggcaaaaccggtgatgttactttcgatgacctgccgggcctgtagcaattcaaaggggccaatgtctgagtaaggcaagagcgctttttgattgattttttccagactatcaataaagtaagtgcctgcgccttgcttaacctctaccactcccttcagctcaagcataataatcgcctcacgaatcgtcgtgcggctggtttgaaaacgctcgctgagttctctctccgccggaagtcgctcgccagctttaaatacccctgaatagagtagttcttctatttgcagccctatatcaaaatagcgccgcttggttaaaatttgttccatgcacatacctatgtagacagcaattgctccacttgagggtagtgtaaacaaatcctaatgtttatggtaaacaatttccctgccagagagtggtcgtttctttcccgcaacctacggctatgcgcgtcacacagtccttccccaccagactcggcaggaaaggtgctgattcccataacgcatatttgacgtttgatgccgggtttatttgcggcagggcggcggcgcatacccgttgttgtccgccgggaaagcctgcgaggaacaaggcggtagcgtatttgttgctttaccctgcaatgcaaaagcggcaaagccgatgacgccgatgttgcgtacatcgccctgcgcggagtgggccgcataagcgtcagctacgtcggcgaactggaatgccgcctcagtgtgtttatctttgcgaaaccctttaatcgccagtgaatcgccggcgttaacaatatagccatgatgattcagcgagcctgcttttccgttcaacacgtccaggccatcaaccgttgcgacgatttcgtaattggtatcatgactgtaattacgaatatataactgatagttcatccctgatcttgcaggaatactatattgccattgtcccattgatgcgttgtagcgacgagtaattggaatcgaattaaaattagcgtcgcgcacagcatattcaagatcgctgatacgtatactataaactttatcgtaacctgacggatattgagtggagtaatttattatcaccatttcggcaggttctcgatcggcacgttctaccgaaacgctttgtaccgatgaatgcacgtcgccgccccaagcggtgccgacgtcggatgaagagccattattagattgcattccgctggaacaaccgcctaacagcaaaaacaagccaacaatgacggcattaaatttaaatttgctcatactcacacccctttttaattattagggggattgtaggcccataagattacatagagaagcgacgcgctgataattaagaatttataaaatataaaagggtcgatttaaataattaaatcgacccacaagtggaatactcttaattactcatcttcaagataagtataaccgtacagtcccgcttcaaattcctcaaggaactgctgctgcaacgcatcgtccagatccgtctgttttacctggtcgcggaaatgcgttaacagcgttttcggatccagttgcacatattgcagcatatccgcaacggtatcgccttcgtccgacagttcaacctcgacgctaccatccgggaagacaaacacgtcaaccgcttcagtatcgccaaacaggttgtgcatgttaccgaggatctcctgataggcgccgaccataaagaagccgagcatcggtggattctctggatcgtattccggcatcggcatcgtcgtggcgataccgtcgccatcgatatagtggtcgatagcgccatcggaatcacaggtaatatccagcagcacggcacgacgttccggtacctgatctaacccttccagcggcagcaccgggaagagctgatcgattccccacgcgtccggcattgactggaacagcgagaagttgacgtacattttgtccgccattcgctcttgcagttcgtcgataatcggacgatgcgcacggttttgcgggtccagttgcttctgcacttcatggcacatgctgagataaagttgctccgcccaggcgcgctcctgcaaactaaacgcgccggaagagtagccgatatgaatatcgtgcagatccatttggctatcatgcagccattcacgcagcgagcggcgagtgccaggcttatgcatctcctgccaggtttcccacagattttgcagcgcacgcggcgcatcttcagcaggggcagtcggatccgtgtattcgttacgctccacgccgataatgttagagaccagtaccgtatggtgcgcagtgacggcgcggccagactcggtaatcaccgtcggatgcggtaaaccatgctcttcgcaggcatcgccaatcgcccagatgatgttattggcatattcgttcaggccatagttcaccgaacagtcggactgcgagcgggtaccttcataatccacgcccagaccgccgcccacgtcgaagcactggatattcacgcccagcttatgcagctcaacatagaaacgcgcggactcgcgcacgccggtcgcgatatcgcgaatgttcgccatctgcgatcccaggtggaagtgcaacagttgcagactgtccagacgcccggcgtcacgcagggtctccaccagttgcagcacctgcgtcgccgccaggccgaattttgatttttcgccgccggaggattgccacttaccggacccctgagaggccagacgcgcacgtacgcccagacgaggaaccacgttcaggcgctcggcttcttccagcacaatcgcgatttcagacatcttttcgatgaccagataaaccttatggcccatcttctcgccaatcaacgccagccgaatgtattcacggtctttataaccattacagacgattacgctacgggtcatgccggcatgcgccagcaccgccatcaattccgcttttgaccccgcttccagccccaacggttcaccggaatggataagggactcgatcacgcggcgatgctgattgaccttaatcggataaacgaggaagtagtcgccgttataaccgtaagattcacgcgcacgcttaaacgccgcgttaattgaacgcaaacggtgttgcaggatctgcgggaagcaaaacagcgccggcagacgctgaccttgcgcttcgcgcgctttcaccagtttggcaagatcgacacgcgcttccggtacgtcgggatcggggcatacgctaatatggcccagctcgttgacgtcgtagtagttattgccccaccaggcaatattgtaagtgcgcagcatcttgctggcttcctgggagctcattgcaacctcctgcatggagcgtagtacaccctgttcgcctgctgacgaaggcgaacccatagacatgtcgtcagacatagcgaacctcaatttttattagcaagtgtaaaacagttgactactatcgcaatccgaagacgcgataacaacccatagacaagcggattttccagcagatagcgctgatgctccgcctgcgcgaccggtttctttttcatatcattgtaaacacgtaaccgaactcacagataacggttcggcgaaaccacgagaaaactcttgcgttaacaagagcgcccttgttcagtcttcagcgccattgccggctctggaatcctgagaagcgccgagatgggtataacatcggcaggtatgcaaagcagagatgcagattgcgggggacatgcgcgcaccagaacgatgcgacagattcagcagaatacaacggttcattatctcgtatcacctccacggccgcctcgtaagacgaacccacaagccaaagcaacgttttaacccggctggaagtggcgacacgaagaaaacgtcgtgtgcttttgtatgagccgcgcgtcgcgttttatacccagaacgcagaaaaaaagcaaagcataaatgcgcataatgtcagcattatcagaaacgtttaccgcctgattttgaccgacattgcgacggccttcaaaaaaagctggaaattgggcgaagaagtgacctaaaatagccgtccagatgttaatccatccatactgattaacactcagactgccagtgtcagcaaccttcagactcatggtagaatcttctgtcatgactattccgcacaacagtttgagctaactaaattctccttaggtgaaattaaatatggcaaaacacctttttacgtctgagtccgtatcagaagggcatcctgacaaaatcgcagaccaaatctctgatgccgtgttggacgctatcctgcaacaggatccgaaagcacgcgtcgcctgtgaaacctacgttaaaaccggcatggttttagttggcggtgagatcaccaccagcgcctgggtcgatatcgaagagattacccgtaatacggtgcgcgaaattggctatgtgcattccgacatgggctttgacgccaactcttgcgcggtactgagcgcaattggcaaacagtctccggatatcaaccagggcgttgaccgcgcagacccgctggaacaaggcgcgggcgaccagggcctgatgtttggctacgcgacaaatgaaaccgacgtactgatgcctgcgccaatcacctacgcgcaccgtctggtacagcgtcaggctgaagtgcgtaaaaatggcaccctgccatggttgcgtccggatgcaaaaagccaggtcactttccagtatgacgacggcaaaatcgtcggtatcgacgccgtggttctctctacgcagcacgcagaagatatcgaccaaaaatcgctgcaagaagcggtgatggaagagatcatcaaacccattctgccgtctgaatggttaaatacgtccactaagttttttatcaacccaaccgggcgttttgttatcggcggcccgatgggcgattgcggtctgaccggtcgtaagatcatcgttgatacctacggcggtatggcgcgtcacggcggcggcgccttctccggtaaagatccgtctaaagttgaccgttctgcagcttacgctgcgcgttatgtcgcgaaaaacatcgtggcggcaggtctggcggatcgctgtgaaatccaggtctcctacgctatcggcgtagcggagccgacgtccatcatggtggaaacgttcggtactgaaaaagtgcctgctgaacagttgattctgctggtgcgcgaattcttcgacctgcgcccgtacggcttgattcagatgctggatctgctgcacccgatctacaaagaaactgcggcttacggccacttcggtcgcgaaaacttcccatgggaaaaaaccgacaaagcgcaactgctgcgcgatgctgccggtctgaaataatcgcccgcgcctgacgctgtttttcagtcagggaaaccataccgtacttatcaaggccagcgctctgctggcctttatcattgctgatacacgcaacgttatcagatattccagcgtgaatttatactgacctttttgtgatgcgcagcacaatccactctcccctttcgtttcttcgactacactttttatcattcagtttcagtcatcatgaaagcggttacattcattttcattaagaactgactacatcactatcggtatgctaattctgcgatgaaaatattacataatttttcaactttgtctaaataccaggcgattgatatggttataagattattaaaactattatttttcagataattaaataatcaccgagataaatagcagtgtaaacgattacaccattgtgattagcctcacatctttttacggcgtactcacctactcttaacatcgataaaattgctaacccaaccggagggcataatgcctgacaataaaaaacaagggcgttccaacaaggccatgacattttttgtctgctttcttgcagccctggcaggattactttttggcctggatatcggcgttatcgccggtgctttacccttcattaccgacgagtttcagattaccgcacacactcaggaatgggtggtcagctccatgatgtttggcgcggccgtcggcgctgtcggcagcggctggctctcctttaagctgggtcgtaaaaaaagcctgatgatcggcgctatcctgttcgtcgccggttcgctgttctccgctgcggcgcctaacgttgaagtcctgattatttctcgcgtgctgctgggtctggccgtcggcgtcgcttcctacactgcaccgttgtacctgtccgagatcgcgccggaaaaaattcgcggcagtatgatctcaatgtaccaactcatgatcaccatcgggattctgggcgcttatctgtccgataccgcgttcagctacagcggcgcatggcgctggatgctcggcgtgatcatcatcccggctattctgctgctgatcggcgtcttcttcctgccggacagcccgcgctggtttgcggcgaaacgccgtttccatgatgctgaacgcgtcctgttgcgcctgcgtgacaccagtgcggaagcaaaacgtgagctcgatgaaattcgcgaaagtttgcaggttaaacagagcggttgggcgctgttcaaagagaacagcaacttccgccgcgccgtgtttcttggcattttgttgcaggtcatgcagcaatttaccgggatgaacgtcatcatgtattacgcgccgaaaatcttcgaactggcggggtacacgaataccacggagcagatgtggggcaccgttattgttggtctgactaacgtgctggcaaccttcatcgctatcggcctggttgaccgctggggccgcaagccgaccctgacgctgggcttcctggtcatggcgattggtatggggattctgggtacgatgatgcacatcggcatccattcgccgtctgcgcaatacttcgctatcgctatgctgctgatgttcatcattggatttgcgatgagcgctggtccgctgatttgggtactgtgctccgaaatccagccgctgaaaggccgcgatttcggcatcacctgctccaccgcgaccaactggatcgccaatatgatcgtcggcgcaacgttcctgaccatgctgaacaatctgggtaacgccaacaccttctgggtctatgcgggcctgaacgtactgtttatcctgctgaccctgtggctggtgccggaaaccaaacacgtttcgctggaacacattgaacgtaacctgatgaaaggtcgtaaactgcgcgaaatcggcgcccacgactaatccctccacgcttcctcctgccacaggaggaagcgtttttcttgcagtccctcttccgtcgcactattctctgccgctatgaaaacccctcgtctccctatcgctatccagcaggccgtgatgcgtcgtctgcgggaaaatctcgcccaggcgaacctcaagctcgatagacattatccggagccgaaactggtgtatacgcaacgcggcacctcggcgggcaccgcctggctggagagctacgaaatccgcctcaacccggtgttactgctggaaaacatcgacacctttatagcagaggtcgtgccgcatgaactggcgcatctgttggtgtggaagcacttcggacgcaaggctccgcatggcaaggaatggaagtggatgatggaaagcgtgctgggcgttccggccagacgtactcatcaatttgcgctgcaatccgtacggcgcaacacctttccctaccattgccaatgccagcaacatcaactcaccgtccgccgtcataaccgcgtagtacgcggcgaagcggtttatcgttgcgttcactgcggtgaaccactggtcgccgggtagttcccgaaacgtccgggaactttcctgagcggactgattgcatacagacacaactttcgttacgttgcgggctcgttttgctatggagtgtgcaatgtaccgtaatttttcttttgccgctgcgttgctggccgcagcgttttcaggccaggccctggccgatggcattaacaatttttctcaggccaaagcggcgagcgtcaaagtcaatgctgacgcgcccggcagcttttactgcgggtgccaaatccgctggcagggtaaaaaaggcgtcgtagacctggagtcctgtggctataaggtgcgtaaaaacgagaatcgcgccagacgcattgagtgggagcacgttgtccccgcctggcaattcggtcatcagcgccagtgctggcaggacggcgggcgaaaaaactgcgctaaagacccggtctaccgcaaaatggaaagcgatatgcataacctgcaacccgcgattggcgaagtgaatggcgatcgcggcaactttatgtatagccagtggaacggcggcgaaggtcagtacgggcaatgcgccatgaaagtggattttaaagcgaaaatcgccgagccgcccgcccgcgcccgtggcgcaatcgcccgcatttatttttatatgcgcgaccaataccaactgaaactttcccgccaacaaacgcagctttttaacgtctgggataagcagtaccccgttaccgcctgggagtgcgagcgcgatgcgcgtatcgcgaaggtccagggtaatcataatccctatgtgcaacgcgcttgccaggcgcgaaagagctaacctacactagcgggattcttgttaacccatgccctggatagccaaacgccggggccatgacgcggatttttttattatgcgtattccccgcatttatcaccctgaattgttgacgtccggtacgcagatttcgttatgcgaagatgcggccaaccatattggtcgtgtacttcgcatgggaccgggacaagcgctacagctgtttgacggcagcaatcaggtattcgatgctgaaatcattagcgccagtaagaaaagcgttgaagtgcaagtgatgaaaggcgaaatcgacgatcgtgaatcgccgctgcatatccatctgggccaggtgatgtcgcgcggtgaaaaaatggaatttactatccagaaatcgatcgaactgggtgtaagcctcattacgccactgttctctgagcgctgcggcgttaaactggatagtgaacgtctgaacaaaaagcgccagcagtggcagaagatcgccatcgccgcctgcgaacaatgcgggcgtaaccgggtgccggaaattcgcccgccgatggcgctggaagcctggtgcgccgagcaagattccgggctgaagctcaatcttcatccgcgcgcccatgccagcatcaacactctgccgctgccggttgaacgcgtccgactgctgatcggcccggaaggcgggctgtcggcggacgaaatcgcgatgaccgcgcgctatcagtttactgatattctgttaggacctcgcgttctgcgtactgagacaaccgcgctcaccgccattaccgcgctacaggtgcgttttggcgacttaggatgaagcgttaacggagaaaataatgatcaagctcggcatcgtgatggaccccatcgcacacatcaacatcaagaaagacaccagtttcgctatgctgctggaagcccaacgtcgtggttatgaacttcattatatggagatggccgacctttatctgattaacggcgaagcccgcgcccgcacgcgaacgttgagcgtggagcaaaattacgataaatggtacgagttcggcagcgagcaggagattaaactcgccgatctggacgtcattttgatgcgcaaagatccgccgtttgataccgagtttatttatgcgacctatattctggaacgcgctgaagaagaagggacgctgatcgtcaacaaaccgcaaagcctgcgcgactgtaatgaaaaactgtatactgcctggtttgccgacctgaccccggaaacgctggtaacgcgcaataaagcgcagctcaaagcattttgggaaaagcacggcgatatcattatgaaaccgctggacggtatgggcggcgcgtccattttccgcgttaaggaaggcgatcctaacataggcgttattgccgaaacgctgaccgagctgggcaaccgctactgcatggcgcagaactatctgcccgctatcaaagatggcgataagcgcgtcctggtcgtcgacggcgagccagtgccttactgcctggcgcgtattccgcagggcggcgaaacccgcggcaacctggcggctggtggtcgcggcgaaccccgtccgttgagcgaaagcgactgggaaatcgcccgccgcgttgggccgacgcttaaagccaaagggcttattttcgtcggtctggatattatcggcgaccgcttaacggaaattaacgtgaccagcccaacctgcgtgcgtgaaattgaagcggaatacccgatctctatcaccgggatgttgatggacgccatcgaagcgcgtctggcgaagtaaaggtttattgcccggtggcgtgcgcttaccgggcctgagcaattacgccgccccggtcggataaggcggcgcatcagcatcgccatccggcaatctattgcccgataaggcagccgtcctttggcaaaagacggcttatatgagtgacaaccgtccgctttccccacatactgaacgctgtcgtttttttgaaccaggaaacagaacctctgacaatgaatttacagcatcactttcttattgccatgcctgcgctccaggacccgattttccgccgttccgtggtgtatatttgcgagcacaaccaggacggcgctatggggattattgttaataagcctttggaaaatctgcaaattgaagggattctggaaaaactaaaaattacgccggaaccgcgcgattcggcaattcgtcttgataaagccgtgatgctcggcggcccgctggcggaagatcgcggatttattctccatactccgccgtcacgtttcgcctccagcattcgtatctcagacaataccgtgattaccacctcccgcgatgtgctggaaacgttaggtacccaacaacagccttccgatgtgctggtcgcgctgggctacgcctcctgggataaaggccagcttgaacaagagttgcttgataacgcctggcttaccgcgcccgccgatctcaatattttgttcaaaacgcccattgccgagcgctggcgcgaagcggcaaaacttattggcattgatattctgaccatgcctggcgttgcggggcacgcctgatgagcggcaccttactggcctttgacttcggcacaaaaagcatcggcgttgcaataggacaacgcattaccggcaccgcccgtccgcttccggcaatcaaagcacaggacggcacgcccgactggacgctcattgaacgtttgctgaaagagtggcagccggacgaaattattgtcgggctaccgctcaatatggatggcactgaacagccgctgacggcgcgcgcacgtaaattcgccaaccgtattcatgggcgtttcggggtaactgtcacgctgcacgatgaacgactcagcaccgttgaagcacgctccggtctgtttgaacgaggtgggtatcgcgcgctgaacaaaggcaaagtggactcggcctccgccgtgattatcctcgaaagctattttgaacaggggtattaaagccgtttttgtcagcaggcgggtaacgcggtcacggttgccaggcttactgggcaataagctggtttagtgccttcagcgcctgtaaacgcgcagccgcctccgcctcatcaatccgccacattcccgcaaaggccagcgctgcggcgtgcttgcctagcggttgcgccatagaaacttcaccatcagcgtgatgccacagtacgtatccccgctggcgctgctgcgccacatgcggcgccagattacgccattgctccggagtaaaacgctgcattagcgcctcatcgctttctgccgccagtaacgccaccccaggtaccgactgccaggcagggtacatgcgaaaccccgccagcgcctgacttccctgcgaacccggcgtagagtgataaatatagataatctggtcttcccatagcacgcctaatgccaccacgatgtctttgggcgcatggcgctcaaggataggcaacgcatgggagaacagcgctgaaccgcgaatcgcctgcgccgccaaagcatgaatgcctggcccgggtaaatagcgtcggtgctcatcctgcatcgtgagtccaatagaggccatcgtcattaacaggcgattaacgcgcgtggtattaatatccatcagccgggcaagctcgcgacatccgatagcacggtcgctggagaccagatattgcagacagcgaatgccatctatcaggctttgattcggttgtgatgacatcgttaaatggcttcgctgtggttttaacaaagctgcgattttaacgccggttcgccaggatacaagcctgcatgccgttcaatccaccgcgccagtcaacactttacaacccccctacgccgccatcttcgctacagtcgtccctgcgcctgacgccattgcgcgctctgggcgaatgtcatcatcccctgctgctgcccggtttgtatcacgtgggccaactgatggagtttgccttcacggatcaaattccctgtggctggcgtattaatcagtaattcaaacaacgccacgcgcccatcctgtctgtcgacctccagtttttgtgatagtacggcgcgcagactacccgccagttggctgcgtaccggttctttttcctgcgccggaaaactatccactaatctttccaccgcctgcgccgcaccgcgagtatgcagggttgccagtaccagatgccccgtttccgccgccgtcagcgccaggcgaatggtctcgctgtcacgcagctctcccagcaaaatgacatcaggatcttcacgtaacgctgcgcgcagcccggcggcaaaagtggcgcaatgctggccgatttcccgctgctgtatcaggcaacgcttgctggtgtaacggtactcaataggatcttccagcgtcaggatgtgtttatcggcatgttgattaagatatcccaccatcgccgccagcgtggtggacttcccgcagccagtagcgccagtgaccagaatcagtccgttctcgctggcaagcagtgcgggtactatcggcggcgtctggattttcgccagatcaggacagcgctcgggcaatagccgtagcgccagcgacgttccctgttgatgtgtgaacgcactggcgcgcaggcgccgcgtgccagacagcgagacggcgaaatcaagctggccgtgcgttcgccactgatattgttgcgcatcattaagccaatcaagcagaagcctgtcgacatcaggcgcggtaaaaggcgcgttctccatgcgtccttgtttgcgccatcgcgcaggccaggcgttacacaggtgtagatccgagacgttatgctttacactaagcgtcacaatttcttccatattcatataaacatcctcggaaaatgaacgatatcgcgcataacctggcatacatccgggacaaaatctccgccgcggcgacgcgttgcggccgctcttcagaagaagttacgttgcttgcagtgagtaaaaccaaacctgcgagcgacatcgcagaagccattgccgccggacaacgggcatttggtgaaaattatgtacaagagggggtggaaaaaatccgccactttcaggaagcgaaagtggaaggcctgcactggcactttattggccctttacagtccaacaaaagtcggctggtggccgagcattttgactggtgtcataccatcgatcgcttgcgtatcgcctcgcggctgagcgaacagcgtccggataatctgccggcgctaaatgttctgatccaaattaatatcagcgatgaaaacagcaaatcaggcattccgctggcggaactggatgagctggccgctgcggtggctacactgccgcgtctgcggcttcgcggactgatggcgatcccggctccagagtcagattatgtaaggcagtttgaagtcgcacgtcaaatggctgtagcatttgccgggctgaaagcgcgctaccctgacgttgataccttatctctgggtatgagcgacgatatggaagccgcgattgcggcaggtagcacaatggtgcgcatcggcaccgctatctttggtgctcgtgattacacaaaaaattaaggaaaactgaggaacgccatgaatacgttgaccttcctgctctcaacggtaattgagctgtataccatggtgctattattgcgcgtgtggatgcagtgggcccgctgtgacttttacaaccctttttcccagttcgtggtgaaaattacgcagcccatcatcggaccgctgcgtcgtattatcccgccaatggggccgattgacagcgcttccctgctggtggcgtttattcttagcgttattaaggcgatagtgctgtttaaggtaattacgtttcaggcgattatctggattgccgcggtgcttatcttgcttaaaacaatcggcctgctgatcttctgggtgctgctggtcatggctatcatgagctgggtgagccagggtcgtagcccgattgaatatgtattgattcagcttgccgagccgctgctcagcccgattcgccgtatactgcctgcgatgggcggcatcgacttctcgccgatggttctggtgctgctgctgtatgtcgttaatatggggatcgctgaagtcttacaagcgacaggcaacatgttgctgccggggctgtggatggcgttatgagtgctgtgactcgctgcgaagacggtctggtgttacggctttatattcagccgaaagccagccgcgatagtattgtgggtttacatggcgacgaggtgaaaatcgccattaccgccccaccggttgacggtcaggcaaacagccatctgaccaagtttctcggtaaacagtttcgcgtggcgaaaagtcagatcgtcatcgaaaaaggcgagctgggccgtcacaaacaggtaaaaattattcacccgcaacagatcccgccggaaattgcggcgttaactgagtaggtactccatgcaaaaagttgttctcgcaaccggcaacgccggtaaagtgcgcgagctcgcgtcgctgttaagcgattttgggcttgatgtggtagcgcaaacggaactgggcgtcgattccgcggaagaaaccggcctgacgtttattgaaaacgcgattctcaaagcgcgccatgccgccaaaatgaccggcctgcccgccattgccgatgactccggtctggccgttgacgttttaggcggcgcgccgggtatctattccgcgcgctattctggcgaaaacgcgacagatcagcaaaatctggaaaaactgctgcatactctacgggatgttccggacgacaaacgccaggcgcgattccattgtgtactggtttatttgcgtcatgcggaagatcccacaccgatagtctgtcacggtagctggcctggcgtcattactcgccaggcggccggaaatggcggatttggctatgatcccattttcttcgtaccgtctgaaggcaaaaccgccgcagaactgacccgtgaagaaaaaagcgcgatttcccaccgtggacaagcgctcaagctgctgctggatgcgttacgcaatggctaaactaccgccgctcagtctttatattcatattccctggtgtgtacaaaaatgtccatattgcgacttcaattcccatgcgttgaagggcgaggtgccacatgacgactacgtccagcatctgttaaacgatctggatgccgacgtcgcttgggcgcaagggcgtgaagtaaagaccatttttattggcggcggtacgccaagcctgctttccgggccggcgatgcaaacgctgctggacggcgtgcgtgcgcgcctgaatctggcggcggatgcggaaattactatggaagcgaaccccggcacggtcgaagccgaccgcttcatcgactatcagcgcgccggcgtaaaccggatctccattggcgtgcagagctttagtgagcctaagctgaaacgtcttggccgtattcacggtccacaagaggcgaagcgggcagcaagactggcaaatgggcttgggctacgcagctttaacctcgacttgatgcatggattgccggaccaaacgctggaagaggcgctgaacgatttgcgacaggcaattgcgcttaatccgccgcatctctcatggtatcaattgacgattgaacccaacactctgttcggttcgcgtccgccggttttaccggacgatgacgctctgtgggatatctttgagcagggccaccagttattaaccgccgcgggctatcagcaatacgaaacgtcggcctatgccaaacccggttatcagtgccagcataatctgaactactggcgctttggcgactatctggggattggctgcggcgcccacggtaaagtcaccttcccggacggcaggatcctgcgcaccaccaaaacccgtcacccacgcggttatatgcagggacgttacctggaaagccagcgtgacgtgagtgatgacgataaaccctttgaattctttatgaaccgttttcggttgctggagcgcgcgcctcgcgccgaatttgtcgattataccgggcttacggaagcggttattcgtcagccaatcgacgaggctattgcccagggctacctgaccgaatgcgagcaatactggcagattacccggcacggtaaactgtttttaaactctcttcttgagttgtttctcgcggaataacaaggataagcctgtcgcgccagcgggtaaaatacctgatggcgcgacgcttaccgacctgtggcggttaatgcgccgccggcaaacgcattatttaataacccctttacgacgcaaatcgtccgtatcttttttccagcgctcgtaaccgtcattaatatccataattttcacacggatatcactctgttgcatctgaagtttctgtaccgctatattcagcggatattgccctttctctaacgttatccagtcattctgcgcttttcgacgcagctcttctgatttcaaaaatacctgccgccgttgctcgtgtatgtctaaatctcttttctgctgaatagccgcttcattgcacggctcactctgcttacggcacgcgtctaatgccggttgatagacctctttttcgtatttctcggcatatacgctgctatcgttggcttttacataatcatcgcgctcttttaacgtctttttaaacgcctcggcgcgggtcaacggtttcccatcagcgccttttccccaatacgcgtccgcttcttttttagctaccgctattttcttatccagggcagagagttgttcttcaagaccggggatcgacgctttctgcgcacgccaggaggcttcaatgttgccaaaccgatagttaaagtcatcactgttgacgatcaggtatttatcattcgttttaatgtcgtcaatagcccggccctgatcgctggctgccatttgtaatgagtaatagttcaccgtccagccagaggctggcgtccctttactggttaacatggcagaaaatttaacgggacgatctttggtccaggttttttcaacaaaataataatccgccgccataccaacgccggtatacatatcttcacgggaagaaatatccccttcggcagaccaggtggcctgattgcccgtcgaatcaagattttttaaggtaatggaatccagtttaagtatgccgtggtactgcttactaaactgttcttttaagatgttatcggagggttgagcaacctctgcccaactatagcctgaaatcagggcaaacagcgctgcgccagcaatccattgtcgaaccacttgtggacctcccgtccagagacatgacacccacgattatcataaccaggatgataattagcaagataatagtgttggttgtgcgagaggtcttccaaagatagccccggccttccgaccggggcattatctttaatactgattgaacatcgtctggatctgttttggatctttagtctgggttaacgccagttgcagtaagacacgcgctttttgcgggttcagcgtgccggaagcgacaaagccgtattttgcatcgtcaacttccgcatcctgcgtggttgcgccagtcggcactcgtgaagaacgcaccactaccgtaccgttgtgcgcggcggtcgccagggtatcaaagaccgttttatacaggttgccgttacccactcctgcgctcacgatcccgtcataacccgcgtctaccagcgcttttgccggcagatcggacgcattcgcatagttataaacgataccgactttcggcaacgcggtcagcttcgacacgtcgaacggggtggaggtggtatgtttacgctctggcgtacgctggtagtcaattttaccgttgtggatataacccagcgggccgtagttaaccgctttaaacgtcgccacgtcagtcgtattggtcttagtgacgtcgcgtccgtccatgacggtatcattcattaccaccagcacgccgcggttggcagactgtttatcagccgctgttactaccgcattatagaggttgaacgggccatctgcgctcattgacgtggaaggacgcatcgcgccgaccagtaccaccggtttattgcatttcacggtcagatcgaggaaataagcggtctcttccatcgtatcagtaccgtgggtgatcacgaaaccgtcggtgctgtcgcactcggtattgatttttttcgccagcgtgagccagacttcatcgttcatatcctgcgagccaatgttaacgacctgctcgcctttcactaccgcaatgtccttcaattgaggaacggcatccaccagattttcgacgccgactttacctgccgtataatttgattttgttgctgaatcaccaccgccagcgatcgttccgccggtcgctaagatggtgatattcggtaaagcgaacgctgcgccgctgaaacccattaccagagcagctaatgccgttttcctgaaaaactccatgttatatctccagttatgtcaactggtcgcattatctctatattgcagacgaataatgtgacgccatacgattaaccagcgatatatatccgacagagagtattttttagagatggataacaaaatgcaggaaaaaacagaataaaaaggcgcagatacgatctgcgccattgtttaaaaaggaaagattacttcaggctgccaaccagcgctttgcggctatcttctaaggtcactacgcggctacagacatctttgccaaactgctggaaatctttctcctggtttttccattcgttctggatagcggtttgcaaaccacctagactgcccatcacgccctgtaaaggattgccgccgcctttaagcaccgctttggcgcccatttcgttaatgctgtcctgcaaaataccgcccatcgcctgattcaccaactgctgaccgtcggcacgcacctggtcgatagccttatagtggaacgtcaggccgtccgtacgatgttcgataatgcggttcatttgcgcttttaattgcgcatcaagcttcgtcagacggctacgcatgttgctgctttcgcccacctctttagcgatgattttatccagcgccacgcggcctttttcgacgcgcgatcgggcgccctcatcaatccacggcagcgcgcttcgcagttccgcctggtaatctttcgcctgctcgcgctgcgcggcgctaagggtgtactgcttaccgttgtacatcacattgccgtccggcgtgatcaccaggttgccgttttcacctttcacctgcaccgtttgtggactcaggatcacatcgtcacgcggcgtgacgctgcatttgtaatctgcatgagcggccatcgccgtaaacgttagcactgtcgccagcagcgttttgcgcatcataactttccctcaagacaaagcgggccggcatttgccgaccctgtacttattagtcccaccaaacgtcgaaaagttcgctggttcggacttcttcaaggttgcgcgcttccagccacttacgcacaatcgcctgatgttcttcggtacatttaccgatttcctgcatacaaatcagcccttcccaggccaggtagccgctgccgtcaaacgccagtttattaggctcaataacgtcattaataaagtcatcgacagtcttatcgacctgctcttcagatgtaccttccggaaaacgccatgccaccgaaaatcctaattcctggaattcgtcaatgtgcatttttttacgcagacgacgactacggttctttgccattatttcaccctctcgaacattaagtcccatacgccatgaccaagacgatggccacgttgttcaaatttcgttaccgggcgcgattccgggcgcggtacataatcattgctctctgacagatttttgtacccgtcgatagaagacatgacttcaagcatgtgttccgcatacgcttcccagtcggtcgccatatggaaaacgccgcccaatttcagcttgctcaataccagttcagcaaacggcacctgaacgatacggcgtttattatgacgcgctttatgccacgggtcagggaaaaagagctgaaccatcgataaagaattgtcaggaatcattttatgcaacacttctaccgcgtcatggcacatgacgcgcaggttttcaacgccctcttcattagcggacgccagacacgcgccgacaccgggtgaatgcacttcaatgccgaggaaattctgctccgggcgcgctttcgccatcgccacgagagacgcccccatgccaaaaccaatctccagcgtcaccggcgcttcgcgaccaaacaacgtggcgaaatctaccggcgcttcgctgaactcgacgcccatcaccggccagtagttttccagcgcgtgctcttgcccctttgtcagtcgcccctggcgacgaacaaaactacgaatacggcgcagcgggcgaccgttttcatcaaattccggtgaaatgacgtcgtttttcataaaagtgtagtctgctgtgtttgagttctgaaaacgggcattatccaaagttagttgccggatgcaagcatgaagcgcactgcggaaagttccggtttacaccctgcggcctctgtgctgcaatcttgcccccggcaataatgaatgagtttccatgcaagcgtctcaattttcagcccaggttctggactggtacgacaaatacgggcggaaaacgctgccctggcaaattaacaagacgccttacaaagtatggctctcggaagtcatgttgcaacaaacgcaggtgacgacggtgattccttactttgagcgatttatggcgcgctttccgacagtgacggatttagcgaatgcgccgctggatgaagtgctccatttatggaccgggctcggctattacgcccgcgcgcgtaatttgcataaagcggcgcaacaggtggcgacgcttcacggtggagaattcccgcaaacttttgccgaaatcgccgcgctacccggcgtcgggcgctcaaccgccggcgcgattctctccctcgcgttaggtaaacattatccgattcttgatggaaacgttaaacgtgtgctggctcgctgttatgctgttagcggctggcctggaaaaaaagaggtggagaatacgctgtggacgttgagcgagcaagtgacgcccgcacgcggcgtggagcgttttaatcaggcgatgatggatctgggcgcgatggtttgtacgcgttcaaagccaaagtgcaccctgtgtccgctgcaaaacggttgtatcgccgctgcgcatgaaagctggtcacgctatccgggcaagaaaccgaaacagacgttgccggagcggacgggttactttttattgttacagcataatcaggagattttcctggcgcagcgtcctcccagcggtttatggggcggactctactgctttccgcagttcgccagagaagatgaattacgtgaatggctggcgcaacggcatgttaacgctgataatttgacccagcttaatgcgtttcgccacacatttagccatttccatctggatattgtgcctatgtggcttcccgtgtcgtcactggacgcctgcatggatgaaggcagcgcgctctggtataacttagcgcaaccgccgtcagtcggactggcggcccccgtggagcgcttgttacagcagttacgtaccggagcgccagtttaacgccccggtcgatgaagaggatgacttatgagcagaacgattttttgtacttacctgcaacgcgacgctgaagggcaagattttcagctctaccctggcgaactgggaaaacgtatctataacgagatctctaaggacgcgtgggcgcagtggcagcataagcagaccatgttgattaacgagaaaaagctcaacatgatgaacgccgagcaccgtaagctgctggaacaggagatggtgagcttcctgttcgaaggcaaagacgttcatatcgaaggttatacgccggaagataaaaaataggcccgttgctgaatgacgctgcgcttattcggcctgtgagttatgccggataagcccttagcgtcgctgcccggcaacatggcataacgacaacacaacatgcactcccggaatgatgaaaaaattactcgcgcttgctgttattgcgccgttgctcatctcctgctccagttcgaccaaaaaaggcgagacgtataatgaagcctgggtcaaggataccaacggctttgatattttgatggggcaatttgccaacaatattgaaaatctgtggggatataaggaagtcctgattgccgggccgaaagactacgtcaaatataccgatcagttccagacccgtagccacatcaactttgatgatgggaccattaccgttgaaaccatcgccgggacggaacctaccgcacatctgcgccgggctattattaaaacgttgctcatgggtgacgacccaacctccgtcgatctttactccgatgtcgatgacataaaaatttctaaagaacccttcctgtatggtcaggtcctcgacaataccggccagcctattcgctgggaaggccgcgccacgacattcgcggattacttgctgaaaacgcggctcaaaagccgcagtaacggcctgcgtattatttacagcgtcaccattaatctggtgccgaaccaccttgataaacgcgcgcataaatacattggcatggtacgccaggcctcccgtaaatacggcgttgacgagtcgctgattctggcgattatgcaaacggagtcctcgtttaacccgtatgcggtcagccacgcggatgcgctgggcctgatgcaggtagtgcaacacagcgccgggaaagatgttttccgttctcagggtaagtccggcacgccaagccgtaacttcctgttcgaccccgccagcaatatcgataccggcacagcgtatctggcaatgttgaataatgtctatctgagcggtattgagaatccgacgtcgcggcgctatgcggtcattaccgcctacaatggcggcgcaggcagcgtattacgcgtattctcgaacgataagattcaggccgcgaatatgattaaccgcatgtcgccgggggatgtgtaccagatattaaccacccgacatccatctgcggagtcgcgccgctatctgtataaggtgaattccgcccagcgatcgtatcgccgccgataaaccatcgcatcccgcctctggttggcaaatgacagaggcgggaaaggtaaaagtgttaactccgtcacccttttgctttgcaatcagaaattgtttgcaaatatttgtcacaggtaacaaaaaaagcccgcctctcattgatagaatcacaccaaatcacaacggcaaatgtgccttttaaaacattcatccgctctcaggtgtgaggaaattaacatgaatcttaagctgcagcttaaaatactctcttttctgcagttctgtctgtggggaagctggctcactaccctgggctcgtatatgttcgtcaccttaaaatttgacggcgcatctattggcgcagtttatagttcactggggattgccgccgtctttatgccgaccttgctaggcattgtggctgacaaatggctgagcgcgaaatgggtctatgccctgtgtcatgtcgtcggcgccatcacgctattcatggccgcggaagtcactacgcctggggcgatgttctttgtgatcctgcttaactcgttggcctatatgccgacgttgggcttgatcaatactatatcgtattaccgcctgcagtctgccggcatggatattgtgactgacttcccgcctatccgtatctggggcaccattggctttattctggcgatgtggggcgtgagtttctccggtttcgagctgagccatatgcagctttatatcggcgcgacgctttccgttctgctggtactgtttacctttaccctgccgcacattccggtggcgaaccaacagaaaaaccagagctggacatcaatgctgggccttgacgcttttgcgctgtttaaaaataagcggatggcgattttcttcatcttctccatgatgctgggcgcggaactgcagatcactaacatgtttggcaacaccttcctgcatagctttgataaagatccgctattcgccagtagctttatcgtgcagcacgcctcggtgatgatgtcgatttcgcagatttctgaaacgttattcatcctgaccattccgttcttcctgagccgctatggtattaagaacgttatgcttatcagtattgtggcgtggatgctgcgtttcggcctgttcgcttatggcgacccgacgccgttcggtaccgttctgctggtactgtcgatgattgtgtacggctgcgccttcgacttcttcaacatttctggctcggtgtttgtcgaaaaagaagtacgcccggaaatccgcgccagcgcgcaggggatgttcctgatgatgaccaatggcttcggctgtatcctgggcggcattgtgagcggtaaagtggtggagtattacactcaaaacggcattaccgactggcagaccgtgtggctcatcttcgcaggctactcgctggtgctggccttcgcgttcgtagccttgttcaaatacaaacacgttcgcgttccggcaagttcgcaacccgttgcacattaatccttgccctgtttcgcaggccggataaggtgtaaatgccttatccggcctgcaggcaacgttactttaaaacatatccgtacaagcgttgaattccatcggcatcggtctcgctatataccccctgcaattccggcgaaaaaccaggcaacagattgatgccctcttccagcgccaaaaaataacgctgcgccgcgccgccccaaatctcccccggcaccacgcacagtacgcccggcgggtatggcaatgccccctcggcagcaatacgcccgcccgcctcgctgatacgcaccagctctacatcgccgcgaataaaggcgctgttggcatcctgtgggttcatcgccacatgcggcaggctttctttgcggaacatcgctttttgcagatccttaacgtcaaagctaacgtacaggttgtgcatctcctgacatagctcacgcagggtgtaatcgcggtagcgcaccgggtatttctgaaaaaccgtcggcaatacatccgcaagcggcgtatcgtcttcaatgtgccgttcaaattgcgccagcatcgcgaccagtcgcgccagcttctcttcgctctcggcgggtgtcagcaagaacagaatcgagttgagatcgcacttctcaggcacaataccgttctcacgcagatagtgggcgagaatggtcgccgggatgccgaattcggtgtatcgcccactatcggcatcaatacctggcgtggtcagtaacagtttacaggggtcgacaaaatactggtcatccgcatagccctcaaagccatgccatttcgccccgggttcaaaactgaagaaacgacgattgctggcaatggtctccgtcggatatgcctgccacggcttgccgtcaaccaccagtgggataaagggctgaagcagtttgcaacgggcgagaatggctttacgcgcgtcaatgcccagcgcaacgcactccgcccacaggcggcgaccgctctccccttcgtggattttggcattgacatccagcgccgcaaacagcgggtagaacggactggttgaagcatgcaacatgaaggcgttgttcaggcgtttgtgcgggcaaaaacgcgcctggccgcgaatatggttatcttttttgtggatctgcgaggtttgtgagaaccccgcctgttgcttatgtaccgattgggtcacaaagatcccagggtcgttttcattaagctccagccgcaacggcgaggtatccgccatcatattgataaactgctcatagcctacccacgcggagtcaaacagaatgtaatcgcagagatgcccgattttatccaccacctgacgggcgttgtaaatagtgccgtcataggtacccagctgaatgatcgccaggcggaacggacgcgacgcatcggcgctttccggcatcacgtcacgaatctggtcgcgcaggtacgtttcatcaaaacagtgcgcatcaatgccaccgataaaaccaaacgggttacgcgccgcttcaagatagactggcgtcgccccggcctgaatcagggcgccgtggtggttggatttgtgattattacgatcaaacagcaccagatcgccgcgcgtcagcagggcgttggtgaccactttattcgccgccgaagtcccattcagcacaaagtaggttttatccgcattaaacacttttgccgcaaatttctgcgcgtgtttggcagaaccttcatgtattagcagatcgccaagtttcacatcggcgttacacatatccgcacgaaacaggttttcaccaaaaaagtcataaaaatggcggcctgcgggatgttttctaaaaaattcgccatgctggtgccccgggcaagcaaaagtactattccccatgtcgacatactgggtcagggtgccataaaagggcggcagaagttccgcttcgtagcgacaggcagcgttttccagctccagccattcctgcgcgttcccgactattaccgccgtaacgccgacaggcgcgctgacgggttcatccgcaagcataaacaccggcaggtgaaaaccggtgcgtttaagcaacgccagaataccgctacggctgtcggcagtggtaatgacgactgcggccacatcggtaaagtcggtactgtccagcgccactacgtttcggtgggtggagagacggggaatgagttcaccgctggcggcaatattcattgatttcataagcgcaaatatccgtttcgggagtagagtaaccccagacaaggcccgatgccttgcccaacgagatgccgggtcaaactggataccagctccgaccgccagacatcagtaaaaacagactgtttctgattttactgttgtcctgcagtgagcgtgcgctgccctcaccgcatagcggggatgacaaaaaaaggaaagaaaggggcaaacctcgcgcagtcaggcgacagtgaagacaatataaaggcgctatgttcatcccggcgagccccatgctggcaggagaaatttcgcgcaatcatggcacctttcaccaggcggcgcaaggtaaaatcagcgctctatacgtcacagataatcaagctattaacagcttaatcgcgtgataataaggcaatttgaaagacaaataacaggagtcattgtggtaattggaccttttattaacgctggcgcaattttattcggcggcgttattggcgcgctgttaagtcagcgtctgccagaacggattcgcgtctcaatgacgtctatttttggtctgtgctctctgggaattggcattctgctggtgatgaagtgcgctaatcttccggtgatggtgctggcgacgctggtcggcgcgcttatcggcgagttttgtttgctggaaaaaggcattaatggcgcagtcgcgaaaatccaacaattatttatggcatcgggtaagaagccgacacacgactcatttattcaaagttacgtcgctatcattgtacttttttgcgccagcggcaccggtattttcggcgcgatgcatgaagggatgaccggcgatccaaacattttgatcgctaaatcttttctggattttttcactgccattattttcgcctgttcgcttggcatcgccgtttcggcgatttgcgcgccgatgttgattatccagttaacgcttgccgcctgcgccaccctcattcttccactgaccacgccggcaatgatgggcgactttagcgccgtgggtggactgctgctggtggctaccggcttgcgtgtatgtggaatcaaaatgtttccggtagtgaatatgctcccggcgctgttgctggcgatgccgatctccgccgcatgggcgatgttttttgcctgattctgcgtgcaataacaacaaagtggtgatagattgtgcagtctacgttgatttgaagaaatttcgttgacgaagcgaggcgattacggtttaatgcgcctcgttgcccggatagctcagtcggtagagcaggggattgaaaatccccgtgtccttggttcgattccgagtccgggcaccactttcccttttttatgctttcttatgaattcctcgatgtcttcaagtcaataagtttgaacatagactctttccagaaattattgccatatgatctccattagaccaatataaacggatgcgtgatcataataaaggcagtaatagtaagttttaacattaaacatactgcgaaatttcaattaagtttccatcagggtccctgatgtagatagacattatctcgcctgtggctccagttctctcaaccgggccttcaacaatggaaatgcctgcctgtaagatctcagacacaacatcatttatcggtgtcgatgtaataaaacataaatcggcagatcccggcgttggtctactcgcttttggttcgaactccatttcttgctgatggaggttaattttttgcgctccaaatattaacgcttttctgttttgtttaaatgttaccgcagaaaaaccaagtacctcttcgtagaatcttattgtggttgatatatcagataccgttaatacaaggtgatcaattctgtcaattatcatttgaatagactcatgatgtttatattttagggatgctacattaaaaaatagcattaacctacttttaaatcagatgcattttttttgcatctactctaagttgctgccgaaaattgggatgtgccaattcaatgatgctgagcgcacgctcggttgaagagagccccttcaggtttacggagccaaattcagtgactatccagtgcgtatccgttcgtggggttgttacaggcccctcaaggcggggaacaatacgagaaatcgtatcattcgcggccgttgagcgggtcgtaataatggaacgacctcctttagatgcatatgcgcctctgacaaaatccaattgccctcctgaagcgctgtactggtgtccaagcaaatattcagagttacaggcaccagtgagatcgatttgtaaggtagcgttaatggagacaacattctcattttgcgcaatgatccccggatcgttaacataatcgacaggccgactaaaaaaagaggggttgtcgttgagatagtcatacatatccttttgtcccatagcaaaagtaaatacagacattccccggtcgatatttttacgctgattggtaacgacgccttgttgaatcaaacttaccaaccccggattcagcgcctctgtatggacccccagatcattatgttccttgagcgcattacagatgagctccggtaatgcgccgacccccatctggagacaagcgccatctggcacaagagaagcgataatctgactgatagcaatatcttcggctacggcagtacgtattggtagttcaattaaagggacatggttttcaacaatggcgtcaatttctgaaatatggattgcagcaccttctccatgaacgcgcggcatatatttgttaacttcgacaataagctttttagctgtcctcgcaatccgggtggaataatcgtttccagttccaaaattaaaatagccatacttatccataggggacacggtgtgaataaaggtatcaataccaatatcatcagctagtaatcgcgtcgcctgatgaaaatttgaaggtacatagttaactatttttcgcccggaactctcaatcccctgacgtattaaagcccgttcaataccggtaataaacatactgtagagatgaatatagtcacttagctcataacggaaaatagtgttcccggcaatgctggctgtttcataacagtaaacccgcagatcgttgatttctccccttttcgctcgctttgccagcgcattcagcaaagctggaggctctgctgcaaacattcccatagagaggtgactgccggaggtaattaaagtaaccgcctcgtcaggcgtcacgcatttttcggcatacactgcattaacattcatcatgactctaaacctcagggcgatttctcaataagcggcgtcttcttcaggcgaacatccacagcaataaactaacattgttcgttcgaagcgcatgacctctacaccattctggttaataccacatgtccgaacggtaacgatgccttgtcccgggcgactatttgacaggcgtttgctgagtacagtgctttcagcataaagtgtatcccctgcgaaaaccggatggacggcttgtaccttatcccagccaagattggccacgaccttggcgctgacagtacgcacgctcataccggttaaaagcgccagagtgaacgttgaatcaaccagtaactttttccattccgttttgctggcgtaagccgcatcgaaatggaccggctgcacattgagagtgagcagggtaaaccacacattatcggcgtccagaaccgtccggccgggacgatgttcaaaaacatcaccgggatgaaaatcctcccagtaaagacccgaaatttctcggtagcgcccctcgctaatggttttataagcgggtaataacgtgttcataatcaattcctctgttaataaaatcaggaaaagatccctgcccgggcgagtaatctccgggcctgacgggcaacggctgcatctatcatcatgccgctaacgatcccgacgcctttggcattctctgtcagtactgcacgagcatgattaatttctgccgttgtaggagtaaatgcggcgttgattacactaatctgagcggggtgaatagccgattttgcagaaaaaccaaaactgagcgcctgcagcgtttcctctttcagacctgaaaaatcgcctatatcaaagaagggagcatctattgcaagaagccctttcatagcgcaggcagccactattctggcccgcgccagcgcaagaggctcccaggcgggtgtggcgccaatgtcagccgccatatctgcggcgccaaacatcaacccgcagagtctgggggtggcgtccgcaatagactctacggcattaagcccaacaactgactcaataatgccaataaggcgagtatcagaaccagccatcatgataagactatccacgatttgcaggtgcgcggctgactctgtttttggaagaataatgtaatcaggaaaaaaacggcattccagtaacatatgcaggtcttcaatgccagcatgagtattcattccattaattcttaatgctattttcagcgatgagtttggtcgggatgaaaggaactgcatcgcaattttccgggcctgcgccttgtcattcggggtgacggagtcttcaagatcgataatagaaatgtccgccgcactttcaactgcttttatgaaacgttctggtcgaattgctggggtaaaaagccagctacgtgtcggtgtatgagaaatatcgggcatattgcacctcctgttaacctcactatgcgctcgctggtttcattcttccaatatatgatggtgccattcttaattgcttttggagatgaggatggaactgcgccatattcgctattttctcgccgtcgctgaagagcggcatttcacgcgggctgcgacaaaattaggcataggtcagccgccgctaagccaacagattaaggatctggaaagagagctgggagcgcagctattccggagagtgcctcatggcgcggaattaaccgaggctggaaaagcattttatgatgttgttaaagggatgcctgctaccgcgacaagagccgtgctggcggcgcagcgtgtcgccaggggggagtcgggcgtgttaagggtgggttttactgcctctgcggcatttaacagtgtggtgcccggcgcaatccgtactttcaagcgggcttatcctgacgttcgtttgcagcttgaggaaggaaatacaacccaactggctgatgaattgaatgaaggatcgctggatgttgcctttctgagacccggttttacaggcaatgaacggttccagctcaggttactgtctgaagagccaatggttattgtgctggcagaaacgcatcctgctgcggcgtgtaaacagattgcactctcgattctcaaagatgagttttttttactcttcccacgtgaaatcggcctgtcgctttatgacgcagtgatcaaggcctgcggtaaagcgggctttgaaccgaaaattggtcaactcgtgccgcaaatttcgtcagtcattaaccttgtgtcggcagagatgggcgtgtcgatggttccagattcaatgagacaggttaatgtcaagggagtagtataccgccccgttgcagaccagatgcccgtcgcaaaactggctctggcataccggcgcggcgatacatcgccaacgctgagaaacttcatcctgaaagtcactggctgaatgcggttatgtgagcgttgaataatcatttgaaacgtaaccaataattattggtccgattttgtgtctaaaggaatcgctaacggagcaggaactggctgcaatgtctgtggatcgacagccagataacgcccggttttactgtcgatacccacataatcgataagcttgcctttggcataaagcaccattgtctgttttgcaaatgcctcatatgcgctgctcagtattttcactttatccgcataatttgctgcgagattatgcgtttccagggggtcacgttgcaggttgaataattcccatggcgcattacccgcctgtgggaatactgtgacaagacgacgcaatttccattccccatctatccaggccgcctgattatggagttcaacaccatattgtgtgcgaggcgcgtgcagactttcaccggtcagatagcgtttaaaactcacgccgatcattggcagtgtcggtctttcagataatgatttactggcatcaatacctgcaaattcatagagcgtgggcgcaacatcatacgccgccatcgtggcgttatctatggcgccatgatggatgataccaggaccggaaatcataaaactggtattaattcccccctgaccgctggtcgttttgtgatagcgaccataaggcgcattgctgacatcagcccagtggggaccataagagataaatgaatttttacgaccaatattttcgtaacgattatcgaattgcttccaaaaatccggttcagattcatagtgaaagccctccgccggattcacaccattatcacttaagaagaccagaatcgtgtttttatcgcgcccggtcttttttaacgtctcaataacggtgccgatctgtgcatccatattggcgatcatagcagcgtaaacctgcatcaccttcgccgtatatttctgctgttccggggtcatcgcctgccattctttatcaagttccagtcctggcagaggtatgtcatcacgcaggaaacccagtttcttcaaacgagcaatacgctgacgatagacgtctgcatagccctgttcatactgacttttaaaacgactaatccattcatccggcgcctgcagaggatcatgtggcgcagtaaaggccaaccacgcgaagataggttgttcccgtggcgtctcgctgatccagcgattaatctggctggcataggcttcgctggagtaaaaactggagggcagtgaaatgcgctgattgtcacgggtataataggtatgaaatatctccacggttcccagcggcacggcatcatcaaagtgactggcgcctccccccatcaaggcgaaagaatgacgaaagccccgatcttttggcgtcgagcctggcgtaaaaccaagatgccatttacccgccatcagcgtattgtaaccagcatctttaaagcgttcagccatggtcgtcacccgatcagtcaggcgcaattcatagccttccttacctatggtattttcataccaccacataccgcctatacccgcttgctgactggtgttcccggttaatagcatcgcacgggcgggagcagacatgggagacgtgtaatattgactcatccgcacgccgttctcagccatcgcctgcaaattaggcgttgggatttccccaccgaagggagtgatatcagaatatcccatatcatcagcgataatcacgataatatcaggacgttcgttttgcgtactgtgcgccgtaccggagaagataatgctaagtgtggcaagtgttacttcttttttcacggcttattctccatttcagactacggatgttgtacaagagcggcgggcaaatgcggcaagaggaaccatcagcccgaaaatctacccataacgtcagcacgccaggctttcagtccattcagatcccggggccaggcgcgtagcggagccagaatctccgtgaaaaaagagtaatagccgctacaaagtcggttgtagccggcactgttgatatgtgcggggcagcctccctggcagactattttcacagaacaccgttgacactcccggcgctggcttttcttaataccaaagggaagccgggttgcggaatctacggctggcgctaacgtattattagcaagctgtcccaggtaatgctggctattaatcagatgatcgcaggcatagagtttgccgtccggctccatgaccagattcgttccgcagcgggcggaatggacacaggtggcgctgatatgcgtaaaatattgtgcccatgcctgttcaatgttgatcacaaaaacccgtcccatatcgccgcgtttgcgccattgacgccagatatcaatcatgaaacgtccccagttatccgcactcaattggtaacgttgctgtagggcgttgccttcgttcatcagtggctgaaattgcagataacgaacgccaaggctaacaacatgatcgtagatggctgccgcatggcgagccatgtcatcatgcacgacaatcagtacattaaaatcgactcgatagtgttgtaacaatgtgattccccgcaacaccgccggatagctggcctcgccgcgtttgcccggacgatgatgattttgcaagtcttcactgccctcaagactgatgccaatagtaaaattattgtcgcgaaacagacggcaccaggcatcgtttaacaacgtcgcattcgtttgcagactattactgatcgtcacgccgtcaggcgcatatcgttgttgaagcgctattacctttttataaaaaccgattccggctaaaagcggttcaccgccttgccagacaaaattaatttcacgcgcactggcaggttgcgccgcaatatagcgacaaataaaaatctccagcgttgattcattcattttttctacgggcgtttcgccctgtggataataacaatagcggcaggccagattacatgcagggcctatgggctttgccagaatatgaaagggtatctgcgcgcgatattccgtcattacggggatttgttgttgccgtaatgtgttgagattcaacattattctgtcctgtagttatcatttctgatgcggagacatgactcacatttcgcaatagcgttcgtctggcgctgcgggcagaatgccgagagcaggctgtatctattgatacgccggttttctgcatagcgcatgacgctattgaaacgttatttagcaaatcctgtctgagccagaaattaagtctctgttaacctgcgctattacagaaaatcatagaacagtcgtctcaaaagaatatcgtcctgaaggacgagaactcacggcattttcaggagatgagtcaaccgcgacagaaaaaaatcatattaataattttaaattattttttagaaaaccagacaggatttaaattaaaatcatttattttcaagatgttataaaaaataccgcaacatacgtcacattattaacatgtgaatgattgtgttaaccgaatgtaaattgtatgtttcaacataccactattttactgcgccccgacgcgctcatccggatggaaggagataacatgtcagccttatcaactactggccataatgacgggatcactctccattgcttacagagcattgcgcaactcattcctctgtcgtcggcggttttttatcgtgttaatgcttatttaaagccagaagcctatgttttacataacatttctaatagcacacaccaacaatatctggagcattttcaaccattagacccgctatcgccttcccggttcggccaacaggttgttaccgtagcgacgatgacgcccggtatctgtgcccgacatcgccattattatcatgaatttatgctacctaatcatgtgtgcgacatgattgagatctttattcgtcggggccatcgtattatcgcgggcatttcattaatgcgcgatatacctttttccagcgaagagcgtttgcgagcccaggcagtacaaccattactgggactggcgattcatgattctcttcaggaagacaacgatctggagtcaatattgaccgccaaagagcgtgaaattgtgggaatggtctgcgaaggggccagcaacaaattgattgcccgtcagttgaatatttctctctcaacagtgaaaacgcatttacgtaatatttttgctaaaacagaagtgataaatcgcacggaactggtttcccgaaccagaatgtcttcggtacaacatgcacagcatatgtgaaagcgtgctttttaacccgcgtcaattgcgggtcttttccccattgtcatatatgcctgaattaataccactctctgatctgatgcctcaataaaatgtcatattatctggcgtcggtatcctgttgcagccattgattcatggcctgattgatcatatttatcacactaagcagaagaacacgctggtgccgctcaagccgcagataacggcgcagcggcggcattttacaaactacttcgctagcagcccatagctcaatgctgcaataccattccttatgatgtaaaaccagcgtaaaccgacgataatccagttcactcagtgcctgttgtaaattggggaaacaattaagatagttaatcagcccggcggtacttttgctgccagtaaaaatgacgggataacgtttcagccatccgggctgatgaacgcgaattttgccctgcaaaggataattgattgtgcctttcaccctgaattcacaactgtgaatactggccatgaataaccgtttttgctgagcatggcagataacctgggtaaatgcattcagatgcagcacggcgctatgttcggtcaatttttcacaacgccagccgctcaaatcacgtaacaccatgttcattaatgtgctcttaaaccaggggacggaggacatctggcgtcatctcttcattgtttcgcttttcataattgcccatagcccgttccacgacctcttctaccggaagcgggaggaaaggattaacccgttgcacacataatgtccagaataaggcataggcggcagtcaatccaagcataataccgaatggtataagtacatcccgactgttcattcctggaggcgcgatattaataatggcgataataatacccacgctcgaaataatctgaggtaagggaaaccagggggcccggtaagcgcgtggtaaatcggggcgccgaatacgtaagataacgaccgataacgttaccagcagataagctactccccaggcgcagaccgcagcgaggatcagcggaacaatgtggtcgatatcaccgttcagataccaggcatgtaaacagggaatcgcaacaccgaatgcgatggcgatgaccggtgttttaaagcgggggtgcaaccaggtcagaaaccgcggcaaagcgccgtccagcgccatgccgtatataatacgcggtactgccgccattagcgtattaatcgtcgcacatcccgctaacaacaaccccacgcccagccagtattgcccgacatgtcccatgacacgattggcaaaggcgggaatagccatcggcgtatccagtaaaaagatatggtttgccgcatcgaccaccacattatttacctgccggttaatcgcagcgccatagaggaacatacaacctgccaccgctaaaaggccaagcgccatcgctctgggaatcgtacgatgcgcttttttaatttccggcgccattggcgtgaccagttcacaaccgacgaacataaacatcgccatgccaatataaccaaacagaccagaaagattactgacatcaagaggtgcgccaaaccacccggaatgatgagtgaccggggataacaggatcccgcataaaccgaagatggtcagggtagtccacataccgaatgtaagaaacacttccaccttgccaaatacttcaacaccaatggcattcagtaacccgaaaaccactaccatgccgacgccaaccatccaggtattgtgctgcatggccacgtgttcgctaacagactcaaagttcaccagcgccatgacgccagcgagaatcgtttctgccgtgccggcaaaaatgtgtacgatcaggtaagcgcaaagcgcaccggtgatagcgaaaaaacgccccatcccgcaggaaatatagtcgtagacggagccagtcgtgggaataagcgttgccgcttcggcaaaggtggtaatctgcgcttgcatcataataaatgccagtaataccgcaagagcaaaggtatctccccctgagccaaaaccactggtcacggtcaggatcaccgggcttgccataatcagcccgacggagctggcaagcgtcgtggggaaaccaataacgccacgttcaagatggctggcaagtctgtttttaaacatggtcaacctcttcactattattacaacaataaattaccgctccggaataacgcttatttatggcaggcaccgtatctaacaggtatcgtcctgaagagggataacggtaaataacgttgtgacgccgtccccgcatgcgctaatagcaagtggggagcgcgttattctccccagtgatgccaacgctactgacgaacaattaaaggattcaaccctgcttatggctttcaacttttgccagataatgttttacaaaacggggcgttaaaactttccatgccacttcggttccctgttcaacaaaccaactatcgcctggtgaaaaacgtatcggttcctgacccgcaacagtgagttccacttccccttccagcacggttgcgtgctcggtaaagggataaatcatagtgaaaccgccgcgggtcgatgaaaacagtccacaggtaaatacgtcctcaggtttaccgtaaatcatcgcaacggcgacctggggatcgccttctgttggcaacgcccccaacaggctgacactcccgattggctgtaattcaggaacaggttgattgagtttaaaagcttgcattaatgttctcctggttaattccggcctttccagaaaccggctgtttgatgtatcagttttcccgcactgaccagcaatagacgtagactgtcgcgaccataaattgtcgcgtggggaatgctactcatcagacgataccgctcggaaccgccatttattccttcggccaggattttgcatacaatatgggaaggcgtgacgccaaatccggaataaccctgaacataaaaaacattattgtgctcacgaagcgtgccaatctgcggaaacagattcgcgctacaggccatcggtccgccccaggcaaaatcgattttaacgtctttcaaataaggaaagacctccgtcaacagagtgcggttccaggcagcaaaatcgtgcggggtatattcaagaaaccttgtggcgctgccaaacagcagacggttttcttttgtgagacggtagtaatttatcaccgggcggatatcactaaaagccccgcgcaagggactgatccgctcaacaagctcgctggagagaggttctgtagagacctgataagaataagtaaccagcgttttcttataaatttctggttccagattattgagaaaactatcacaggcccacagcaatttggccgcttttacgctgcccatcgcagtacgtacccgcacagttttaccgtaactgacctcaaccacaggtgaatattcgaatatcttcacccccagcgaattcgcagcctgagcggagcccagcaataaattcagcgagtggacatgccctccccccatatgcttgagaacaccgcagtagacgtcggaaccgataacctgctgcacgtctttaccggtatagagttcaatatcgtcttccggcgtagcggctttgaattctttttcccattgttgcagcgtttttaactgccgctggttgtaggccagataaccatatccggggacaaaatcagcatcaatatggtatttacgaattcgctcccgaataatgcctgcgccgaggttcgagattttaaacagcgtctccattcccgctgcgcctacatattttttaacggcttcgatgtcgtgacctataccggccatcacctgaccgccgtttcgcccggtgccgccatacccaagatggcgggcttccagaacgacaacattagtgatcccctgctccgccagttccagcgcggtattgatgcctgaaaagccaccgccaatgatcaccacatcggcatcaatatcgtcttgcagagcaggaaaatgcaacgggtattttttcgtcgcgccgtagtaattcaacgcatcgatttttgtattcatcgcgttaccttgtcatcacgcttgactaagaccgctatcacagcacggtaacgttttacaaaatatcgtccggaagaatgacgttctttggaacgatattcagttccaggcaagtatgttgagatggaaaaacgtacattcctgacctacaggcacttctgatgagcgacgtgacattacttgccgaagtaacgacttttttacgccaacgacacggacaatttattgcaggtgaacgtcaggccggaaacggcacgaacttctcggtcactaacccagccaccggcaaaatcatcgccgacgttgtgtcggcaacccctgcgcaggcagaagaggccatgcagagcgccagacgggcgtttgatgtctggcgtaaaatgccaacgttacaacgcggcgcattactgctgaaactggctgatactcttgccgctcatcgtgaagagttagctcaactggaaagcgtctgttcaggtaaaacgattatgctgtcgcgcggtcttgaactcgatcagtcagtggccttcctgcgttactttgccggttgggcaggaaaaataaccggtgaaacgctgaatgtctccctgccatcaatgggagaagagagatacacagcgtttacccaacgccaacccattggcgtggtcgtcggtattgtgccgtggaatttctcaattatgattgctatctggaaactggccgcagcgctggtatgtggctgcaccatcgtcattaaaccaagtgaatataccccgctgacactgctgcgagtcgctgagctggctaaagaggcaggtttccctgatggcgtaattaacgtggtaaacggtgctggcggtgagatagcgcaacagctgatcgcgcatccagattgcgccaaagtgagtttcaccgggtcagtcgcgacaggtgagaaagtccggcgttcggcaacatcgtcaggaaaacgcgttaccctcgaactaggagggaaaaatgcggcgctgtttctcaatgatctcacggcacaagccatggtcaacggtattcttgaagccggttatctgaatcaagggcaaatttgtgctgccgcagagcgtttttatctgccccaggaaaaactggatacggtcatgacgctcctcagacaacggttatcggagatcgtgcccggctcgcctttagatgaaaaaacggtgatgggcccgctggcgaatcaggttcagcttgaaaaagtgctgcgtctgattcaacgtgcacgggaagaaggggataccattgtttatggcggtgaaactttacccggcgaagggtactttttacagccgacagcggtaaaagtgcgtagtaaaaacagtacgctgatgcacgaggagacctttggccctgtctgtagctttatcggttatcagaatgaaaaagaggcgctttcgcatatcaacgattcgccattcggccttgctgcaagtgtgtggtcggaaaatatatctaaggcattacgctacgctgaagatattgatgctggcatggtgtgggtcaatatgcataccttcctcgatcccgcggtaccctttggagggatgaaaggatcgggcataggtcgtgaatttggcagcgcgtttattgatgactataccgaacttaaatctgtcatggtccgttattaaccatcctgaaaatgatgcaggcagatcaaccataccgaaaggtggactgtctgcctgattatcaggttcgctcgctgcgtttttttgcttttgggataatgttaaacgcccggcccggcgttccttcctgcattactagcgccatctaccgttagagtaggctatctccagccttaacggttcagactcatcctgtaacatcgcttccaaagacaacgccagcgtctgatgatgggcatcttttacactgactttcagcatattgatgctcggttcataacgtaaaatagcagcgcgaagctcacggcaaaaccagttgagaacccgtttgtcacccacattcacctcgtgccattccggcataccccgagtgagcagcggcggtaatgtctcgccacctggcacggcgcaagagttgaataaacacattaacttgcgtcgtaccaattcatgtgggcttatcccctcaaccaagagcctgtcgaatagcgcgaccggaatggttggtgtcatcatcatttccctatctggttcatcgccagatcccatactgacgttctggactcctgctgagcgccgtctgatttctcggcagtgatttgccattcgattttcgtgaagttcagcgacatcgtttccaccggcttaccgccggcgccgccgctaacactgagttgtgatatcagcacgtttgtcagggtataaacgataagcgaccgcattttgccgtcgtcattgcggcacaacgtcagcaccgcggttctaattagcctcccgctacagcagtactcattgagcacaggcgtggcgaggtcgacaaatttggtgagcgacatttcaccaacatgcgcgcgcccggaagtccgctcagtgaggctaacatcgttatttacctgcattgccacattgtggctataagacatgatctctatctgatcttcaaagccttcaacctggctttcgcctttgatattgtcgagctttaaaaaaatcgcatccatgatttatctccttgttgatcaggtggcagttcagcagccagacgaataccggcggccagcgcttgtgactcttattaaaagcgcaacgaccaaaaaacacagcgtgaaaagcgccaggtttgcagggattttgccgacgtttacccacgtctgatgaacgttattccgctggttgcaaagcaatagagggttttggcccgctgtggccaaatacaattgaggttatactgaacgctctctgccatattcaatcccttttatcgcaaagtatccctggtgccggtatcacagcgtcgttattcaaaaattgacatttcagaataataatcagctatatataaaaaacacatcaaaaagcaaatatcaacttaatttttacttatttaataaaaaaatccaaattgatttacatcaattaacacacacaaaaacattaaaaatcaaagggttaaatgaaaattaatcactatggaaattttatttttcttaatactcacattataaatgttatttgcttattatcctgtgaaaactaaaaaatgatttaaatcaaaaaacaaactattctcgttgattaacgttttgaccgaaataaaaaagattttatacgtcccgggatagtctccctttctgatggacaatatgcattaacgagcgggcaaacaggtaacttctgcccgggtaatccgttacccgactgatattaacattgtcatgaggtgatatcatttgcccggccagccataatcatccggaaccggcgctacgccacgaacatcaggacggagcattttttgtcgatcctcttcgtcatccacccagacactggctatctcttcacaggttgcaaaccatacgccatcatgccctttaatatgttcaatcaaacgtaacaacatcatcatatgatgcccatgaccgattatctgcggatgaagagccatcgcatataaactgttttcctgatggtgataagcataggtaaaaatatccttccagcgtcgcagaacaccgtcagtatcgctcatcccctcctggttgccggtatacgccagtgcgggaaaatcatccagataccagctaacaggaatttccagaatcgcgctggccgggcctgcgatatttcccgtctcccaattcacctgccaacgttgaggatggtaaggcacaagatctctcgccatcaggctactgtcatagagaaaaccggcttcctccagaagatccagcgtattctcgctataatcccaatagggagaacggtatcccacagggcgtatgccgaaatgtcttttataacaggcgaacgccagatccataagtcggcgttctgtatcacgattcaccagcgtcggattttcatgatagtagccatggtgagcgatttcatgcccggcatcaaaaattgctttaatgatttccgggaaggtgtctacagtgtgtccgggaataaaaaaggtggttttgatattattttctttgaacaatttcagaagccttggtacgccaacttgagcaccaaactctcctcgtgacataaaggatggcgacggtcgattaaatccgcccagccataaagactgagcatctacatcaacaccaagattgaccgcaatccttttaccctcaggtaattttaaatatcccataacgacctccagctaatacatagaagggacacattctgttatttaatgtgtgatggccagatattatatatgcctgcttttctgcgtctgtccttgaacgttgttgctgcccccccaagtctattttcatatagaacatcgaggttaatttctcctgaaatgacatcctcttgattgacgtgcgcctctgcgataataccttgtggatttttccacacgacatcacaggggcttaaaattgaacttcgggcccagcagcctggcagtggcccgcccgggtttcctcccaggcaacagtgaacaagataaatttgattttcaatacaacgtgcgtggcaacaatgcctgactcgccaaaatccctgttcagtaaacgtagcggaaggcgttaaaattaactccacaccctgttccgccagcgtcgcggcacactccggtatttctgcttcataacaaatattaaaacccacctttgcaaatggcagttgaaaaacagccattttatcgccttcctgagtataccaaccccgttcagccgggaagatatgcgtcttactgtgagcataatgttcgccatcgggtccccatatatgcgcaacattctcatagcgatctgctccagtctgctccagatgagagccagcaataatgaactgtcctctttctttcgcttcctgttgaaaaagctgcttataggcatccgtgaactgatcaattaaagtaaggtgtgaaatgggtctttcttgccattttttcaatagtgtaaatagctcaatggtaaatagctccgggaagataacgacatcagctccctgacttttattaagaagtatccttacctttgttatgaaatcttcaaaagtgtttatttcggtaacaatatactgacaggctgaaacagtaaaattacgtggcatcgtgatatccccggcatgaaatttaaacttaaattaacgtatagcgcatggagaatattagggagtggacattacgacatcaggttattttttgtgaagctgcgcaaaatatatggagaaaagagtagaagcattgaacctttatttacataaaggggactttatcgatgatcgcagcgagacagagagtcgataaaaatccaggcgaaaaacaataacccttaccacaatattattttcagcatctgaaaataatcaggcaaactaaatgataacgcgctggtataaaaccaacgcgtatttttaccgataagggtaatgaagacggccacccgaaggtggccgttagaacccggtagcgcttcgcttatcaggcctgtgaaaccgagacagctttagcggtgagacgccagcggctgttccgtcattggcgggtggtgcttttccggatctttaatcagtacccacaggatgatggcgccgataatatcgaacagactgagtgcaatgaagaacgggccgtaaccgataatagcgaccaatgcccccataaacaggttgaagcttaactgtcccatccatgccgcagatcctgccagaccggcaaccgtcgcgacctcatttttcttgaacaggtcagcgctcatggtaatcacgacggtagacagcgtctggtgcgcaaaaccgccaatactcatcaatgcaatggcgacatacgggttagtcgtaatgctgacaaaaccgatcgaaatcatcaaaacagcgccgatggtaaagctacaacgacgcgcattgatcgtggtcatgtgcatcttttccatgaagaacttcgccaggaaaccgcctgcaacgcagccgaagtccgccgccaggaacggcagccaggcaaacatggcgatctcttttaacggcagatgcatcacgttaatcagatacagcggcatccagaaactcagcgttccccatgccgggtcagcaagaaaacgggtaatcgccaatgcccagaagttacgctttttaacgatctctttaacggccggttttttattatcgtcctggagatagctttcctggccgtcttcgatataacgcagctctttgtgggtgatccacgggtgtttatttggcgagttataaatcaggaaccaggtgatggcgaacagcacgccgatcccaccggtaatcacaaacgccatttcagtaccgatgccgctatcagcaaaggtcagcatcgcccagaccaccagcggcggcgccagcatcgcgccaattgaagtaccgatattaaacaggccccccgcaataccgcgttctttcgtcgggaaccattcggcgctggctttaatcccggccggaatcgctgacgcttcggttagccccatcagaccacgcagaaatgccagacttatccagccgccggccagcgcgtgcgccatgttgatcagcgaccacaacaaggcaaagataaagaagccgattttcagtccgatgacatccatcaaatagccggtgatcggctgcgcaatggtgtaacaaagctggaaggcgctcaccacccaggaatattgttgctcatcaaaatggagttctttcatcatcgctggcgccgcaacgctaagcgagctacgggacaggtagtttacgatggtccctacgcagaccaggccgataatccaccatcttaattttgtcatcttcatgataaagcctcgttaaaaaacattagctccgcgccgtctgacctgtagcgggaaaactgaaatcacaaaaattggttgaccaatcaatattttctcatccggaccggtcaaaatctggcggcaactcccgcctttaatattcttgaaataaatacatcaactcatttcaagttgaatggtgaatgctttccacccagcaaaaattgacacagatcaaataaataaaattggcagaccgtgaatgatgatatttgtgatttggttagccaatttagacaataaggttgacatgagaaaaattttggttgaatttagggggcagaacgggtttacaaagcacgtttcgaagttggctggcaatgggtcaaccacgaagacgttatcgcaagaagaggaaacgagatatgaaacaaacctggcgctggtacggacctaacgacccggtaacgctgtcagatgtacgccaggctggcgcaaccggcgtggtaacggcgttacaccatatcccgaatggagaaatttggtcggtagacgagatccagaaacgtaaagctatcgttgaagaggcgggtctggagtggtctgtggtagagagcgtacctatccacgaagatatcaaaacccacaccggtcagtacgatttatggatcaaaaactaccagcaaacgctgcgtaacctggcgcaatgcggtatctatacggtttgctataactttatgccggtactggactggacacgtacggatctggaatacgtattaccggatggttccaaagcgttgcgttttgaccagattgaattcgccgcgttcgaactgcatatcctgaagcgtccgggagcagaagccgactatacggcagaagagattgctcaggcagagcggcgtttcgccaccatgagcgaggaagacaaagcacgtctgacccgcaacattattgccggtttacctggcgcggaagaaggctatacgctggatcagttccgtcaacacctggcgacgtataaagatatcgataaagcaaaactgcgtgaacattttgcctatttcctgaaagccattattccggttgccgacgaggttggcgtgcgtatggccgttcaccctgacgatccgccgcgccctattctcggcctgccgcgcattgtctctaccattgaagacatgcaatggatggtggaaaccgttaatagcatggcgaacggcttcaccatgtgtaccggatcttacggcgtgcgcgccgacaacgatctggttgatatgatcaaacagtttggtccgcgcatctactttacgcatctgcgctctacgctgcgcgaagagaatccgaagaccttccacgaggccgcccatttgcacggcgatgtggatatgtatgaagtcgttaaagcgattgtggaagaagagcaccgtcgtaaagccgaaggtagcgacgatctgatcccaatgcgcccggaccacggtcatcagatgctggacgatctgaagaagaaaacgaatccgggttattccgccattggccgtctgaaagggcttgcggaagtccgcggcgtcgaactggctatccagcgcgctttctttagcaaataaccttctttcgcatggcgcgacgcgtcatgcgatttcccctactcaatgcaatagcaacatgcctcgccccggagatcgcgggcgaagacgtcgaatgacaggagtttgcaatggaacagaatatcgccaccgcccaggtttccgtcgcccgcccaaactgggacaaatcacgtctggtatcccgtattgtgcatctgggctgcggggcgtttcaccgcgcgcaccaggcgctctttacccatcatctactggaaaagagcgacagcgactggggcatttgtgaagtgaacctgatgccgggtaacgacgcgcggctgatcgcgaacctgaaagcgcaaaatctgctgtacaccgttgcagaacgcggcgcagaaagcaccgaactgaaaattatcggttcaatgaaagaagcgctacaccctgaattcgacggtcatgcagggattctggcggcaatggcgcgcccggaaaccgccatcgtctccttaaccgtgaccgaaaaaggctactgcaccgaccccgccagcggcgagcttgatgtcaataacccgctgatccaaaacgatcttgcccatccacagcagcctaaatccgccattggctatattgtcgaagcgctaaacatgcgccgggagcaaggactgaaagcttttaccgtgctgtcgtgcgataacgtgcgcgagaatggtcacgtcgcgaaggctgccgtcctcggcctggcgaaagctcgcgatgccgccctcgccgcatggattgccgacaatgtgaccttcccctgcaccatggttgaccgcattgttccggcagcgaccgaagagacgctacaactggttgccgaccagttaggcgtttatgatccctgcgctatcgcctgcgaacccttccgccagtgggtcatcgaagataactttgtgaatggtcgcccggactgggataccgtcggcgcgcaattcgttgcagatgtcgtaccgtttgagatgatgaagctgcgtatgcttaacggcagtcactctttcctcgcctatctgggttatctcggcgggtatgacactatcgccgatactatgactaacccggcttaccgtcgcgcggcgctggcgctgatgcttgatgaacaagcgccgacgttgtcaatgccggaaggcaccgatctggaagggtatgcgaatttgttgattgcgcgtttcactaacccctcgttgaaacaccgcacctggcagatcgcgatggatggcagtcagaaactgccgcagcgtttgttggacccggtacgtctgcacttgcaacagggcgatgactatcgccgcctgacgctgggcgtcgccggatggatgcgttatgtcggcggtgtcgatgagcaaggtaaaaccattgatgtcgtcgatccgctgcttgcacagtatcaggcgattcatcagcaatatcagacgccggaagaacgcgttcgcgggctactggccatcgagtctatctttggcaacgacctgccgaagaaccacgaatttgtgcaagccgttaccgacgcttaccaacagctattgcagaatggcgcgaaagccacggtagaagcgctggctaagtaaggagataaatcatggctacgtttatgactgaagattttctactgaaaaacgacattgcccgcacgctgtaccataaatacgccgcgcccatgccgatttatgacttccactgccatttaagtccgcaggaaatcgccgacgatcgccgtttcgataacctcggtcagatctggctggaaggcgaccactataaatggcgagcgctacgaagcgcaggcgtggatgagtcgctgatcaccggcaaagagaccagcgattatgaaaaatatatggcctgggccaataccgtaccaaaaacgctgggtaatccgctgtatcactggacgcaccttgaactacgccgtccatttggcattacaggtacgctgttcggaccggataccgcagaaagtatctggacgcagtgtaatgagaaactggcgacgccggccttttccgcgcgcggtattatgcagcagatgaatgtgcggatggtcggaaccaccgacgacccgatagattctctggaatatcaccgccagatagccgccgacgacagcattgatattgaagtcgcgccaagctggcgccccgacaaagttttcaaaatcgaactggacggctttgtcgattacctgaggaaactggaagcggcggcagatgtcagcattacccgtttcgacgatttacgtcaggcgctcactcgccgcctcgaccatttcgccgcctgcggctgccgcgcgtcggatcatggcattgaaacgctgcgatttgcgccggtgcccgacgacgcgcagcttgacgccattctgggcaaacgtctggctggcgaaacgctgagcgaacttgagatcgcccagtttaccacggcggtgctggtctggctgggccgccagtacgccgcgcgcggctgggtgatgcagctacatattggcgcgatccgtaacaataatacccgaatgttccgcctgctggggccggataccggctttgactccattggcgataataacattagctgggcgctctcccgtttgctcgacagtatggatgtgaccaatgaactgcccaagactatcctctattgcctgaacccacgtgataacgaagtcctggcgaccatgatcggtaacttccaggggccgggaattgccggaaaagtgcagtttggttccggctggtggtttaacgatcagaaagacggtatgctgcgccaactggagcaactgtcgcaaatgggactgttaagtcagtttgtcgggatgctgaccgactcccgcagtttcctttcttatacgcgacatgaatatttccgtcgtattctctgtaacctgctgggacagtgggcgcaggacggagagattcctgatgatgaagcgatgctaagccgtatggttcaggatatctgcttcaataatgcccaacgttatttcacgattaaataatcgctattaatctgtgagcacaggtttcaggtattttgagaggcaggaaggcggtaagagagtgagaaatttagcagtaacgcacttttccagccaaagtctggccgccgataaaaagcaaagaggttactgattaatcccgaatcacttactaaggtaagtgattcgggtaaacaaacacagccatcttctgcgtcatgctttttttctctgtccggaataactccagtgcagaaagagtgatacatcagtcctgttgatgatggatcctgtgggttatacggtaataacttatgacttcacagtgtggtttcttttaacaaatcgacagccagcatttccagctggttaaccacctcattactggatcgctccattctgtcgagttcttgcgacatcgcattcatatcgcctgcggcaaaatagttcagcgcagagtgaccagcggtatgcacctctttatgcggcgcttccagactacggaaactgtagtaattgctaaactgctgcccttcaaaaccgtagtaccatttccccagccgacactgatcgtgcatcgttattttactgtttatgtctttatttaagagtaatttgtagacttccattttccagataacatggtcaactttgacaatattcaaaaactgcaccgtagagatgtactgcatgaccgatttcatgctcagcgatttatcgatgacgatgccaatagactccacaatttgatttatgttagtcgtaatattatcaataaccggctgttggttatccagcacctcactcactctggccgtattatctttgattacagaggttaacgtactgacgcttttcgaactgtgtttaacatcttcggacaggtttttcacctctttcgaaataacgctaaaaccacgcccggcatcccctacgcgcgcggcctcgatcgcggagttaatcgctatcaaattggtctggttagcgatcttctgtatctctttaatacacgcattaatttgcgttaaggaggtatttaagtcgcccatacgacagccaatatccgatgaagtcgtgccaatttcggtgataaattccacgagcgattttaatgaacttctggctttatcattctgttcattaagttcattaatgcgttctttttcaatgttgagctgctcacaggatttaatgatggcattacgaatgatatcgatcgtcgagatccccatcagaattttttgacacagtatccgctcataaggctcaggagtatccaccaccacgtcagacgcattagcgccagattctgctgctggcggcggtattttgacaacattattattccagtggcgcaagcctaatacttttttaaacatataccattctccttattatatgtggacatcctgatctatgcctggataaagtattatcaactcatgctaacataatgaaaaatcggctgtcatctgccataaccatacgctcaccagaataagacaaaacgtccaccaaacttaaataattacaaggtaaactattcaacaataccattaatagtcatgatggaagtcgcttcgctttatacggaaatattatttacaaggctgacaataatagctgaataataattaactgcatttacttaggtgtatctatatctcggcccgaagattgcaaacagggtttaaacgcaaacttttgcaatagaaaaataacctaacgtaaactttttatatgaccaataatatcatttggactcatcaatatattatgctgtccgtttaccagccaaacaggcatgacctaaatccaaaggaatgggggcagcgtaaccagccgcaaaaagtatcgattagtcgaaaatcaggaaacggatgcgccaacgaggcgagcgtcaccgcctgcgtcagaaaagttaagaataatttgtgatattatttctcatatgttaccagtaaatggcaggctgatagcccttcgctggtaaacacaacaggcgggatatcggcacccacgccgatatcccgacgagaatgaccccgttacgctttgatgacgattaacggttcaatatcgctctcttttttaatgactaatgaatcatcgccgcgcaggcacgtaccgccgtagttaccgcccacggtaaacgtacagacctgaatatacttcccggcgaccttcggcaggcaccacaactgctgatagatatttttctgcgtggcgaacttgccgctggttttatccagtagctcttcctgatggctcaccaaatcgatattactaccgcaacgtccggctatcggttttaccgcatagccggtctgcaccagctcatcgttaacggtaaaatccgtgtcgagcaaatagcgatgatgcgggaacagcgaccacaggataggcaggatcgctttgttgcccgggatcaccgtccacagcggttcaaacaccaacacttccgggcgcagtaatacatcaatcagccggacttcattttccgggtgcccggtacgaataggcactgcggcatactccgtctcgctgacttcgcgtatctgctccatcgccgtttcccacgcccaggttttccagacacaattcaccagccgtccgtcgccatcgatcaactgcccggcgtcatcccagcgcaactcgcccagcccgcggaggattttgctcgcgaagccggcctgatgcagcgcctgctgcataaactgcgcgtgatagtcctcctcgatatcatcatcctgcatgatatggacgaaaggacgcgctttactgtgtttccaggcgcctgccagctcgttaattaagccctctgccgggttatgccctttaccggtatagccctgctcagcccatttttcgagaattaatcccgcttcggtatggcatgatgcggaatcggcattgtattcatagactttcagcccgcgttcatccatgcagaaatccatacgaccggtgatcatatggtgacgacggcgctgccaggagaggcgcagacgcggccaaagaattttggggatatcgaatagcgccagcagattatcgtcttttaaaactttgtccgtggcgtgcaggtacatcaaatgcaactcattggtcgctttgataagctcctgttcagcgctctcggtgatggtaaaatactggtacgggtcctgattgataacgtgcccgttcgcctgtacataggctttttgtaacggatcgcgctcatccagccactgaccgtcaaactgacctttctctggcagtcttgcgccgcgaatcgccagcgactgattcgcgatgtcaggctgtgacaaactgtattgcgtgtcgtcggtctggatcatccagcctaaaatcgtcgtgtcatcaaaggtgtcgcgcagggtgtaacacccgttttctacgaccatttccagttcgcgagtccactgctgccctggcggcaatggcgtgtggataacgttttgctcagcaatacgaattttgttatccaggagttgggtgataatcgcgacgtgcccggtttcgttaaactcgccgcccttttgccagatgagcagcgccccggcctccggcgcgcgcggcgaaccgttcgggaaggcctgcaaaggcaaaatattgtcattcacgacctcgcgcagaaaacgtagcgagaagatttcccaggccatgccgacgtcagtaaaaacaacgccataattcagaaagagaaaacggcgggcaaattccacgcactgccatttatgccccatgtattcatcgtcgatgtagctacgaaaagctgcgtcgtcgtcgtcccacggatcgagggaattgtaatctgaagagtagatcgctacgccgccgggggcgtaacccaataatgtcccgaagggggcatcctgactggtggttcctttgctcatgcacttacctcaaaacaagaccgcctgagcagcctggcgtgatttcgctctgattgtctgctctgtgacactaaccggacagaggtcgacataatcatacacctcaataaggcacactgaggccagaaggttaaaatttcactcgccggaatgtcccaatcggttaaatgtccggttagcaagctgctacactgcttcaacaccaccactgtgaaggcaggtcaatatggcagataatacttatcaacccgcaaaagtctggacgtgggataaatccggcggcggcgcgttcgctaacattaatcgcccggtttccggcccgacgcacgacaaaacgctgcccgtcggcaaacatccgttacagctttattcgctggggacgcctaacggccagaaagtgactattatgctggaagagctcctggcgctgggcgtgaccggcgccgaatatgacgcctggttgattcgcatcggcgagggcgatcagttctccagcggctttgttgacatcaatccgaactcaaaaatcccggcgctgcgcgataactcacacaacccgccgattcgagtttttgagtcgggcgcaattcttgtttatctggcggataagtttggccatttcctgccgcaggatctggctaagcgcacagaaacccttaactggttgttctggctacagggcgcggcgccgttcctcggtggcggtttcggtcatttctatcattatgcgccggtaaaaattgagtacgccattaatcgcttcaccatggaagccaagcgtctgctggacgtgctggataagcagttagctcaccacccgtatgtcgcgggagaagagtacactattgccgatatggccatctggccgtggttcggcaacgtggtgctggggaatgtctatgatgcagcggagtttctggatgccggaagttatcaaaacgtacaacgctgggcgaaacaggtagccgaacgtccggcggtaaagcgggggcgcattgtcaaccggaccaacggcccattgaacgaacagcttcacgaacgccatgacgccagcgacttcgaaaaccataccgaagataaacgtcaaagttaaaccataatgccggatggggtagtaatgtcgtcatccggcatggtattccctgctgacgcttcgcttatcagttctgcgagtgcgtcatattcggcgcttcactaaacccatgttgcatgagaatcaacctcgcccgtgctgacagtaaaaagtcggcaagcgtttttccctgctcgctcaggcaggcaaagccatattcagccacgggattataaggttccgggatatcaaccactcgcagcgaattaacctgccgtagccagggagcatagctggcatagccgataaagatatcggtgtaatcatgattgatgagccattccgctgccagccggcccgccggtaacggcaaagtctgcctgccgccaaccagcgctaccgcgcgttttcggaccgcttcgccctccttgcccatccgcgaaaaaagctgctgcgtataatcgccggaaggatcgcaacctgctgttgaggtgccgatccgcagatcccgccgggttaatagcgacaaccagtcctcgccttcacgcatcgcctgtgcccgcacgctcaggcacaaacggttcgtcgtaaaaggcgcgacccgcagcgcccgcccgctttccagcagcgcctgcggatgcgccaggttcgccgaagcaaaaaagtcgcacgcttcgcccgcttcgatgcgttcacgtaacagccccgccggaccgaaatcacataccgcatccgcctgaaacgccgccattagctgcggccagacgacgcgcaagctccccgcagccagtattcgcattattgtacgccctgatagtcagtacggtaaaaacgttgataccagtcgttagcggccttttgcatgtcaatatcgtggaatttttccggatagagttttttcgccatccacagttcgccgattcccaccgcctccggcatcggatatccccaggctttggcataatccggcatcaggtaaacccgatgatgcttcaccgcgtcaatgacctgccactggggattgtgcaggatctcattgacgacctttggatagcgattctggacaaagatcacctgtggatcccaggcgatcacctgctccattgtcacctgcttaaagcctttcaccgaggatgccgctacattcagcgcccccgcatgggccatcatcagaccggtgtatttaccggaaccgtaggtggtcagctccggattcgccatataggcgcgaactcgctcattttcagggaccgactgcaaacggtcgctgaccatcttgcgacctttatccatcgcctcaatcagcgctttcgcctcttgcggtttattgacgatatcgccaatcagcgttattccttcacgcagcccgcgattataagcctgctcttcatcggccagggtcgggttcattttagcctgctcgccagcaatatcatggcgcagcgaaatcgccactaccggaatgccaagacggctgatcttgtcgatcatctcctgcggagcgtaattcgtgacaaacaccacctgcgggcgcagcgccaccagtttttcaggatcaacgtgcgttagatcgcccagcgaggctttttgcgccagttccggcgccagacgcgcatagccgtcgcctaattgctgtttccagttcgccatgaccccaacgattttgtcagtggcattcatctgtacaaggagattgagcgtttgatgctggagcaccaccactctgtcgacggtgtccggaaccgtgacctggcggccaatttgatcggtaaaagtacgcgccgcctgtgacattaacggccagcaaaaaagcaacgccagcagagagagctggcgcaaaaatttattcataggtttcgccccataatcgatatataaataattatataacgattatagagcgatataatagaggtgattaagggatcacgcgctggtgatgtcgtactccatgcggcgcagcgcatctaacgtggctttcgcttcgtcttcgtcaatgatgctcatggcaaaaccaacgtgtaccaatacccattgccctatcagatcggctggcttaccttcacaaatcagagcaatattgacatcacgtttgatgccacacacttccacctgcgcaagctggtgaatatcatctccgacggccagcacctgaccggggacgccaatacacataattaaccacctgaaataaaatgcgggttattcgacctcaatactttttactttcaacgaatcgccggtatccacccgcaggcgatcgccatgacaatgcggacattgcgcgtcatgcctgagaatttccaccacctgactgcaatcccagcaccaggcctgggccggtctgtagtcgatgtgcaattcgcacccttgcgctaaagtcccctggcaggcgatatcaaaactgaaacgaaccgcgcgctcttcaacgcacgaaagcgcgcctatctccagccatacgccggtgacgcgcgccacgccgtgctgttctgcctgctgctgaataatttcaacggcgctttggcaaagagacagctcatgcattctcacagctccgacggccaaacagcaacgcacgccggcttgtctgcggcgcatcaggattgcttaccggcagagataacagcatccgcgcgcagtcatccgccagccggacgccctcttccggcgacaggctacgggaaagcggcgacatcaacgagcaggcaagatattgcgaaacgccttccagttcgccaacggtaaaggtcatcgtgccataaggcagttgcagaccgagtttttcaccgacggtacgcctgggccagatctggtccgggccagggaagattaatgcgcttaacatccacggcgtaattaccgtgcccgtccattgtccttcaaataacgtaaaatcagagacatgcactggcatagtcggatgcagaaacgaaagatcgtgcatcgaacgatgggctatctcttcaaacgccgcctgaacccgggcgacgggcgccgtgtcgaatccggaaaacgtttcagacatgcgccgtctccttaggaattgcttcgacgccggattcacgcagcgcagcaagaacctgctcaagcgcaggctcaatcatcgcctcgacggttggcgttaagccgatgtgcggttccagcgactgtggaataacgccaaccagggtcagtttcttcggaaactcgccggtaaagcggagggccgacaatacgtcggccagtccaagctgatggggggagattttgttggtgaacagcgccggaacttcatcgtcgcgcagtaccataatggttcccggcgcgttctttttcgacacgatggcgtcggcaatgatcaaatgatcacgattcgccatatcgccaagaagttccattcccgccgtaccgccatccagaatctcaacgaaatccggcagggtgtatcgttgctctaacgcttcaacaatacgcaccccgatggcttcatcggtcagcaaaatattgccgacccctaagactaatatccgcattacaaaaccttcaccgagaccacttcattgccatcggcgtccaccacgtgtaccgcgcacgccatgcaagggtcgaaggagtggatggtacgtaccacttccagcggcttcgccggatcggcgatcggcgtaccgaccagcgactgttcgtacggccccacgtcatcgttgaagttacgcggacctgagttccaggtcgatggcaccactgcctgatagttactgataataccgtctttaatcaccatccagtgagacagcataccgcgcggcgcctccaggaagcccacgcctttgaactcgcccgtcgccggaatgttcggcttcacaaacgtggtgtaatcgcctttgccgatatttacaatcagcgcgttgtattgatcctgcaatatgttttgcagttcacaacagtgaacggtacgcccgatgatacgacccagcgtagagtgaagttgcgccatttccagcgttttgccggtcagcttctgataaagcgcaatgatttcattgagcttggtctgcgtggattcacgacctgcagccagtttacacagcatgttcgccagcggcccgacttcgacggttttgccgtagaatgtcggcgacttgacccatgagtatttaccgtcatccgaccaaccgtcgtaagccgggatcgtagtgccttcccacggcgcctgcggcgcttcatctttgtaccaggcgtgcttcgcgctctcctgaatacctttaatcaggaactcgtcggagtgagaggtgatcggacggtatgtcgacagatcggcattggtaatgtaaccgcccgggaacaggaaactgccgtttttaccgtcggtcgggaattccggcgcgctcaggtagttcaccgcgcctttgccacgctccagccattccggatagtaggccgcgatgactgcggtatccactttatacacctgctcgacaaaatcgctcagcttatcaataaacgatttgatgtacatcaggcgttcaaggttcaacgtaccgatgctgtcgagattgatcgggttcgccaccccaccgaccgccaggttctggatatgcggcgatttaccgcccagcaacgccaccacgcggttagcgtcacgctgacattccagcgcctgcagatagtgagcgaccgcaatcaggttgacctccggcggtaactgcattgccgggtgcccccagtagccgttggcgaaaatacctaactgaccgctggcgacaagatccttgatcttgttctgaactttcgtgaactcttgcgcgctgttcaggtgccagctcgacacaccatccagcatcgcggaggctttttccggatcggctttcagcgcagaggtaatgtccacccagtccagcgcagagagctggtagaaatggacaatgtggtcatgggtggtatgcgccgccagaataatattacggatatactgcgcgttgacgggaacatcaatattcagcgcgctttccgccgcacgaacggaggagatcgcgtgagttgtcgtacaaacgccgcaaatacgctgcacaatcatccacgcatcgcgcggatcgcggttcttcacgatctcttccataccgcgccacatggtgccggacgcccatgctttggatacgacgccgttctcaatttcgcagtcaatgcgtaaatgaccctcaatacgggttaccggatcaatagtaattctctggctcatgctttgctcgcctcatgacgattatgatcgttttgttttaaaggaggaagtatcggcagtagacgaatgagtacgatgtatgcacaaatctcaatggccacaaaaccaatagaaatcaacaattcttcccaggttgggaagtagtggtagccgccacccgggttgaatgccaccagcgaataggtcagacgccacgtcgcgcagcccaacagcgcgctcagcgccgacaggtacagcatacgagagtcattacgcagtttcgccacacgcagcaccactaacgggaagaccatcaggacgacttcaatccagaacatagcggagtaaaaatcgccggcaaacgcataggacagcttgtcgcgataaatcagttcgccaaagcgcaggacgacgaaaatcgccagcagcacgctgatggtattcgtcagcttaacaaacaaatttttctcatccggaccgtttcctttcaggcctgcctgaaccagcgaaccctcaaatatgacaatggagaagcccatgataaacgcggtcagaaccgagaacagcggcagcatttcatagctttgccatagcggatgcactttatagcccgccgagatcatcaatgaccccattgaggactggtgcatcgtcggcagcagcgcgcccagcgcgataataaagaacatcaccttattcagacgcttgagcgacactttccagcccagacgttcaaacagggcaggcgcaaactccagcgccatcacgccgatgtagatggtcatacagaccgccgtctcaaacagtaccgagttcacgttgaagtgacctggaatgtagaagtacggcaggttccagtaacgaccgacgtcgatagtgatcgacaggccgcccagcgagtaaccaaacaagcttgccagcaacgccgggcgcaccaacggatggtattgcccacggttaaagacatacaccgcccatgccaacgcccaaccgccgcaggcaaagccggtgccgatcaacaggtcaaaggcaatccagacgccccacgggaaaccgccgttcaggtcggaaacggagcccaacccgaagaccagacgcttcacgataaggagcatacacaggacgattaacggtccaaaaataatgaccggtttactgatgatttttccgcccagcggttttggatcatgactcatgatcgtctcctccatcgtgatggtcgtttttgctattacgacgaaccagcacggttaagcccgccagcgcagccaggggtagtatcatgcctttataaagcgtgtgttgaacatgctcggagcgcgctccggttgaaaggtcatccagcttcggcagatccagatcttcataaggaacgcctgtcagcaccagcacctgagtaccaccgccctctttttcaccgtagaggtgtgggtagtatttaggcaccgtatgcagataggtgtcgtccgttttcaacgtctggcgcggatagtgatattcactgcctggtttgagggccagacgttttttcgcttccgccatcagctcttcacgagtaccgaaaatgacggcccctgccggacaaacttccacacacccaggcaaaccgcctttatccagacgctcaacgcctttctggttacacaactcacacttgtgaagcgcgccaaacgggttgttgtagtcgtacttaggtacgttgtacgggcaggcaaccatacagtaacggcagccggtgcagacatctttgtcatagtggacgatgccggttttcggatcttttttcagcgccgacaccgggcaaacggaaacgcagttaggatcgacgcagtgcatacactgtttcttgatgtaggcatagccgttctcttcctgatctttgttcacgcccgtaccgctacgccatacctgaataatgttattggtatacggcgacagcttgtcgttgttcgaccaggtctgctccccttccgggttacgcgccgggaagttgatatcctgacactttgtgacgcaggcctgacagcccacgcacagagtggagtcatacagcatacccagcgaacctggaatcggcggacggttttctgcagccgcatggctgacagacggcgcggcgcccaacagcaatgctccaccggaggctgctttaataaagtcacgtctgttcacggttattctccccgtgagtcagcgttatctttcttttgctgacgccccagttcacgtaccgccatcacgctgacgccggcaaccagaccgactacgccgccaagcagaccgacagcgcccgcagagatattgccgccttctttcatattgacgtcaggtttctctgaacgcggagtttggttttcgacatgagcaagctggtgaatgcccttatggaagccgataccttcttcgttacagccatagcaaggatgaccgatcgccactggccagacgccgccaacgtcacagaactgtaacgtagaacagttgccccaggtttccggccctttacagccaagatggtagagacaccagccctgacggtggccttcgtcgccaaattctttggcaaaacggcctgcgtcgaagtgtggacgacgttcgcaatgctcatgaatcagacggccataggcaaaggttggacgatttttcgcatccagcttcggcggcgtgccgtaagtgatgatatgcgcgacggtcgccaggaagttatgcgggtttggcggacaacctggaatattgataaccgttttgcccggtaagacttcctgcagactgacagcgccggttgggtttacgccagccgcagcaacgccgccccatgccgagcaggaaccgatagcgataatcgcggctgcgccatcagcggctttgcggatgtgatccacgatcggctcgccggcaaccatgcagtagataccgttatcttttagtgggatagaaccatccaccaccagaacatattgccctttatacttctccagagcgttatgtttgttttcttcgacctggtgaccgaatgcggcggaaagcacctcgtggtattccagagagatggtctccagaacgaggttttcaacggttgggtgtgtagcacgaagcagtgattcggtacaaccggtacactcctgagcgccaatccagataacgggcggacgctgtggattggataccgattctgccatttctgcggcggctttgctactgagccccatagtagcggccagtgctgcacaaagcttcatgaaatcacgacggttaatgccgtgagaagtgatgagagtattatctccagtcattttatagttattccgttacgaagacctggcttttattttgcactgttcgcgaagaagttattgcgatcggtacgccatttaccacactttttttatggttatgtgcgccataatacttcgacggaacagtaaaacgaagggaagaggcgatagtgtaattaattaaagcaagataatacccctgttggatcaaccttcgagtcgataaccggccataaagaagcgaaccgccatcccggaatgattctctttaaagaaatccatcaccatttctttatccagaccatagcgacgcgtcagaattccagcctcccacgcgctaagttgacgatcgccggtcttttcgaacatacggtgtgtaaaacccaatacaaagccacgtttatactcagaacagaaattcaccgcatgatgcgcgctatatgcatatggcgcgtgcaacccggccattaaccctttcccaaaatgattattcatctgacctccttagtcgctatataataaattatatagcgactaattaaatgaaggccagcgcattacgcgcttttttgcttcacatcagaaggaaacccattcatcagtagactgtgcgggagccgacgccattctctgaacgccaggcgccgctttcgccgttacgcgttgttgcggctcactagcggaaagccggaactgctgtacggagcgttgcaaatcctccgtctgccgttccagcgccgccgccgccgcggaaacctgctcaaccagcgcggcgttttgttgcgtaacgctatccatttgcgtgatcgccacgccaacctgagaaatacctttactctgttcttcggaggcggacgcgatctgtttcataatcgtcgtcacttccgtgacgccgcgcaggatggcgtccatcgtcgcgccggtctcctggaccaactgcgcgccctgcgctacgcgacgtaccgattcgccaattaaggcttcaatttctttcgccgcccccgcgctgcggctggccaggttacgtacctcaccggcgaccaccgcgaagccgcgtccctgctcgcccgctctggccgcttctaccgctgcgttcaaggccagaatattggtctggaaagcaatactattaatcacggtagtaatttcggcgatctgctgcgaactggcggaaataccgttcattgtttctaccacatcggaaaccagttcaccgccttttcctgccgttagcgaggcggcatccgcaagctgactcgcctggcgagcgtgttcggcgttcattttcaccgttgcggtaagctgttccatgctggcggcagtttcttccagcgcggcggcctgttcttccgttcgggaagagagatcgttattaccggtagaaatttccgtcgcgccgcgccagatattgtcgcttccggcgcggatcgtactcacggcttcgcgtaaactgtcctgcatcgcgcgtagtagcggcaccaaccggcctacgcagttacgccccaacgcttcaatcggctggctaagatcgccttgcgcgatgcgctgaaactgctgacggatgcgctccagcggtttcaccatcattgcaaccagatagcgatcggtaaaaatcaggatagcaatgcccagaatcaccgccgtgataagcaggatgcggatggtataggttttaccatcgaccatcacacgtgtgttatccagcatggcgccagcttcatgactaaaccgttccgcgctggcgccgaacgcgcgactgagtgcgggcgtgaccgtactggcatgttcgctccaggcggtcagcgatccttgctgcgccagttgcatttgaggaacgacgcctttctccagcaaggcctgccagttggacaagacctcccttgagatatcagggttcatcggccctggcgatagcgctttcatctcctccagcttctgacgcatattctcgagcgactgccgggcgggcgcaaaatcgggcgtgccgccgccgatttttacatccatcgcgcggctaaggcgggtaacaaagcggaaatattgatcgttaccctggcttagcaccgtcatttgccgcacaagatgccggtcaatatcatttccttccgaaacttcggataaagcatggacgctgtataaccccacccccgaccagagtagacaaaaaagtcccagtatcgtcagcatgaccatacgaatagtaaagttttgcagcaaacgcatatgaatttccttgctgaatataagagattagtcatcagacgatgacgcactctcgttatcggcaaggcgcggagaatatataatgcattctccatttttttacagttaccgccgtttacgtacccgcagatgttatatatctgtgaacgcagagaaaatctttcagtgttattactgagtaaatgaatagatgtagtaaaaatattgcgtaaggctgcagggagacggttatccaccgttaaagaagcgctgttttacagccgggctcagcatcctttgcccgactgccccgccgttgacggcggctcaatggttatgccgcgtcaatctgtccagatagcccatcacaaacgccgacaggacaaaggtcagatggatgatgacataccacattaatttgttatccgggacgtttttcgcgtccataaacacgcgtaacaggtgaatggaagagatagcgactatcgatgccgccaccttattttttagcgacgtcgcatccattttccccagccagttcagcttctccttgcccgcagagatatccagctgagagacaaaattctcatacccggagaacatgaccattaccagcaatccgccaaccagcgtcatatcaaccagcgataacagcaccaggatcagatcggcctccgccagggcaaaaacgttcggcagaacgtgtagaatttcctggaaaaattttagcgctaaagcgatcagcgccaaagagaggccaaaatacaccggcgcgagcagccagcgagacgcatacattacattttcaagaaagcgttccatagggacctgtcaggtaactaaaaccagcaacagtatatctcaaccatgcaacatcagatcaacatgccagttaagagcctatcccaccaggcgttattggcgcagccagtttggacacggacagcgcgcaaaaaccggagcgtacacgtagtacgtgaggtttgactcgctacgctcgcccttcgggccgccgctagcggcgttcaaaacgctaacgcgttttggcgagcactgcccaggtccaaaatggcaagtaaaatagccctaatgggataggctctaaatctcatccgggttaacctgcgggcgctgatattccggccataccagcgcgaccaatgccgggtaggcttcaagactgaactcgcgaaaacactggcgtaaattaaggacgtccaaatccgaatacggcaccttttctccgttcagacaacgcttctttatattgtcgtaatacttataaacggcagagttaaggtcgctgcaacgacgctgtgcgtcaaataatccaggcgtttcattcaactcagtcattgtcattcgttttatcgttgcatgaaggaaatcgatatattcatggttaacgcgccagtaccataccggcgttatcgaattcattaatactgagaaatgatcttcgccctcttcctttgtcatgggttcagtttgatttaaatttacgatttttccaccaggacgttttttattaacctcccacatcaggaagagtatcgcgccggtcagtaatagcaatataataacagaataaaaaatactgttcatagcaggctccattttttttgattttaaaattacgccatgttattgtcaacgaaacctacactattaaaaatagtataccactgatcgtaaaggatatttagtcatgcttcctgagcatctggtttcctctcattttcgcctgtcatcgccgccccctgaagccacagaaaacagtaaaaatttgcctaagggaaagacaaaactcagcgattacgagcccgatattttaattagcgctaacgctgccgggcaacacagaaacgtattatttgaagaacgcgaccgtcatattaaagaacgtctgtattgtgtggctaaaattgaaacgtttgcccgcctgataaacgcactacaggcagaaggcgatattgatgcccaaacgctaagtaaaatactggcggataaaaccgcaatgataaatgaaaaaggcaatgccatttggcttaatttaatcactcgcgaaaccgatatgccgctattttattcactggaagataaagatgaaagaagttgaagacaataacgtttatttggctttagacaaccataaaagtgatgaatttatcttaaagcaaaatcttgcagcactaatcgccagcaaaaatgccaccctggaaaaggtaacgcaggaggtggtatccataccggcggcgttagtacgcctgaagtggcaaaaccgacgggagatgtatgcgttacaggtcaaagaggagatttatggcgcgaccatcaatgccattatcgagcagcatcctgaattacgagacaaaattatgtctcgtcttgaaagtgactggcagcatctgctggctcgcgagacggcaaccttacgtctgacgcgtaagctttccgatggcgactaccggacgcgcaacgtcaccaccgtcgcacggcaagaaaaataaccttcatggctagttaactctgttgtgaatacgggcgaagcataaggatcgttctgattctccctcttacggtagtaaaagtgtctacgcttaaagggtgttcaacctgaagggagaagctcaatgtctcatctatacgaccctaccacgcagtattacaccggcgagtatcctaagcaaaaacagccggcgcccggcgtccaggcgaaaatgacgcctgttcctgactgtggtgaaaaaagttatgtcggcagtggtcgccttaaagatcgtaaggcgctggtgacagggggcgactccgggattgggcgcgctgccgctatcgcttacgcgcgtgaaggcgcagatgtcgcgatcaactatctgccagcggaagaagaggacgcccagcaggttaaagcgctgattgaggagtgcggccgtaaagcggtgttattgccaggcgatcttagcgacgaatctttcgcccgttcgctggtccataaggcgcgtgaagcgctgggcgggctggacattctggcgctggtggccggtaaacagacggcaatcccggagataaaagatctgaccagcgagcaatttcagcaaaccttcgccgttaacgtttttgctctgttctggataacccaggaagcgattccgctgctgccaaaaggcgccagtattatcacaacgtcgtctatccaggcgtatcagcccagtccgcacctgctggattatgcggcaaccaaggcggcaatcctcaattacagccgtggcctggcgaaacaggtggcggaaaaaggaattcgtgtgaatattgtcgcgcctggccctatctggacagcgctgcaaatttccggcggtcaaacccaggataaaattccgcagtttggtcagcagacgccaatgaagcgggccggccaaccggcagagctggcgccggtgtatgtctatctggcaagccaggaatccagttacgttaccgcagaagtgcacggcgtgtgcggcggggagcatttaggctaacgcatgaagtcgattaaggtggcgcaattctgttaagcaaggcgccactttaggcaataaaaaagccgggtggcgacttcgccttacccggcctacagcgtcagcagaatacttatttcgctttcgcggtctcttcgccgaccagaccaatcttgagatagcccgcctgatgcagcatatccatcactttcatcagggtttcatactctacggttttatccgcgcggaagaaaatcgtagtatcctttttcccttccgtcagggccgttagctcggcaatcatcgtatcatccgtcaccggatcgttaccgataaacatggtgttatccgctttcaccgacagataaaccggtttttccggacgcggctgtggcgtactggtagaagcgggcagattcaccttgacgtccaccgtcgccagcggcgcagccaccataaagataatcagcagaaccaacatgacatcgataaacggcgtcacgttgatttcatgcatttcgccgttgtcatccaggttctcgttaagacgcattgccatgacgcattaccctacccgtaatttctgcgcggcgcgtaccggctgcgcactggcgctcgcattcagatcaagatcgcggctttgcagcagcaatacctgcgccgccacgtcgcccagcgtcgctttgtaactgcctatctgacgtgcgaagatgttgtaaatgacgaccgccgggatcgcggctaccagcccaatcgccgtcgccagcagcgcttccgcaataccaggagcgaccaccgccaggttggtggtctgcgtttgcgcaataccgatgaagctattcataatgccccatacggtgccaaacaacccgacgaagggggaaatggcgccgatcgtcgccagataaccgttgcctcgtcccatgtagcggcccaccgctgcgacgcgacgttccagacggaagccggtacgttctttaatcccttcgttatcttcgctgccctgagagagttccagttcattctgcgcttcattgatgagctgtgcgctgaggctttttgcgctgaaacctgccgcaatgtcggaagcctgatctaaagagcgcgcatcggctaattgcagttgttcgcgctttaagcggcgcttttgcgtgaaaaattcaacgcttttactgaagaagatagcccaggtgacgactgacgccagaatcaaaccaatcatcacgcacttcacgacaatatcggcgtgctgatacatgccccagacggaaagatccgtctgcatcaaattattacccactctgtatctccaggacgcaaatcacaaaatctgagcataataatatcaaaacaacgtcgaattgatagtcgttctcattactatttacatactgccgcacctttactgctttttctttgcgcttacgcattaaaaaagccacctgtttttattttggcaaaattttcatctgtatcacacgtcgccagggtgcagatggttatattcatgctagtttagacatccagacggttaaaatcaggaaacgcaacatgacggataaacagttggataccaaactggtaaacgcaggacgcagcaaaaaatacacgcttggctcagtgaatagtgtgattcaacgcgcttcttcactggtgtttgacaccgtcgaggccaaaaaacacgctacccgcaatctcgccaacggcgaattattttacggacgccggggaacgctgacccacttttcgctccaggaagccatgtgtgaactggaaggcggcgccggatgcgcgctcttcccgtgcggcgcggcggcggtcgccaacaccattctggcattcgttgagcagggcgaccacatcctgatgaccaacacagcttatgaacccagccaggatttctgcagcaaaattctcggcaaactgggcgtgacgacaagctggttcgacccgctcatcggcgctgatatcacgcaacatattcagccgaacacgaaagtcgtatttctggaatcccccggttctattaccatggaagtacatgatattccgagcattgttagtgcggtcagacgcgtcgcgccagaagccgtcatcatgattgataatacctgggcggctggcgttctgttcaaagctctggaattcgatattgatatctctatccaggcgggcactaagtatctgattggtcattctgatgcgatggtcgggactgccgttgcaaatgcgcgctgctgggaacaattgcgggaaaacgcctatctgatggggcaaatgctcgacgccgacacggcttatatgaccagccgcggtctgcgcacactcggtgtccgactgcgccagcatcaagaaagcagcctcaaaatcgccgcatggctggcgaaccatcctcaggtcgcgcgcgttaatcatccggccctgccgggtagcaaaggtcatgcgttctggaaacgagactttacaggtagcagcggcctgttctcctttgtgctcaataaaaagctgaccgaggcagaattatcagcctatctggataacttttcgctgttcagtatggcctactcctggggaggctacgaatcgctgattattgctaatcagccggaacagatcgccgcgattcgtcccgcaggcggcgtagattttaccggtacgctggttcgggtgcatattggtttagagagtgttgatgatttgatcgctgatttagccgccggcttcgccagaattgtgtaaagttgccggggatggacatatatgcagacaatttccgtggaaaagtctgcgtttgttgcgtccgggatcaaggcatcccggacgattcaggagtacaataggcgaataaaagcataaatgctgttccacaggaaagttcatggctgtcattcaagatattatcgctgcgctctggcaacatgattttgccgcgctggcgaatccacacgttgttagcgtcgtctactttgtcatgttcgccacgctatttttagaaaacggtctgctgccagcgtcattcttacctggcgatagtctgctgctactggcaggcgcgttgatcgcccaggatgtgatgcattttttgccgacgattggcattctcaccgccgcggccagtctcggctgctggctaagttatatccagggacgctggctcggtaatacgcgtaccgtcaaaggctggctggcgcagcttccggcaaaatatcatcagcgcgccacctgcatgtttgaccgtcacggtttgttagcattgcttgccgggcgctttctggcgtttgtccgcactctgctgccaacaatggcgggcatttccggcctgtccaaccgccggtttcagttttttaactggttaagcggcctgctgtgggtgactgtcgtgaccagcttcggctacgcgctcagtatgatcccgtttgttaagcgccatgaagaccaggtaatgacatttttaatgatccttcccgtcgcgctactggtcgccgggctgttaggtacgctggtcgtggtgattaaaaagaaatactgtaacgcctgacgtatccataatcggccaggatggcccggttacgcttcgttgacccgtggcgggatgccccacttagctcccttgcattgtccgcattcttgccacatcttcgcccggcgtaacgccaaaataacgtttaaactcccggctaaactgcgatgcgctctcatagccgacccgcatcgccgcggcgctggccttcataccgtcgtgaatcatcatcatccgcgctttatgcagtcggtagctttttaaatactgcaacggcgaggtgctggtgaccgccttaaaattatggtgaaacgccgacacgctcatgttcgcttctgccgccagttgctcaacattcaggttctcggtgtatttcatttcgatctgtttaagtacgcgactgatcaggctaaagtgcgtctggcgactaaccagcgcaagcagcgccccgccgcgcggccccatcagcacatgataaagaatttcgcgaataatctgttttcccagaatccgcgcatccagcgggcgctccatcacatccagcaatctttccaccgcacataaaatctcgtccgacagcgtggcggagttaatcccactggccgccatcggcaactggaaacgctcatcttcgccaatgtccatgagcaactcttgcagttgcagcacatcaatatcgagccgaataccggccagcggtacctccggcgtcgcccaggtctcgcattcaaaagggagcggcacggtcagtaagagatattcattagcgtcataacgaaacttgcgcttgttaatatagccaattttatggccggaaaagagaaatatgatgccaggctgatacatgaccggcgtgcgcggccccggttcaacaccatacaacagacgaatgcccgccagccgctcgctgattattttatcattattttttaaatgattaattttatccgccaactgtaagcaaattgcttcacgattcataacgcgccattttttcatcaaatccactccgctggattgtgcgcatttttagcgattttctccagcattctggagaaataggcaaaacattggcagaaatgtgcattgagagacatccctcacaagaccacaatgatgaccatcaggcagacagccgcctgccctctttttacccacataagggaatgagcaatgaacaatttcaaattacatacccctacccgcattctgtttggtaaaggcgctatcgtcgatcttcgcgatcaaatcccgcaggacgcccgcgtgctgattacctatggcggcggtagcgtgaaaaagaccggcgtactggcgcaagttcaggaagcgttaaaaggactggatgttcgggagtttggcggtattgaaccgaacccgtcctatgaaacgctgatgaaggccgtgcagcttgtgcgcgacgaaaatattaccttcctgctggccgttggcggcggttccgtactggacggcaccaaatttatcgccgcagcggcgcagtatacggacggcgtcgatccgtggcacattctggaaaccggcggtactgagattcgtagcgcaatcccgatggggtctgtgctgaccctaccggcaaccggctcagaatcgaacgccggcgcagtcatttcccgtaaaaccactggcgacaaacaggccttccactcctcgttcgtgcaaccggtgtttgccgtactggacccggtctacacctatacattgccgccgcgccaggttgcgaacggcgtcgtggatgctttcgtccataccgttgagcagtacgtcacttacccggttaacggcaaaattcaggatcgtttcgccgaaggtattttactcacactgatcgaagaaggtcccaaagcgctgcaagagcctgaaaactatgacgtccgcgctaacgtgatgtgggccgctactcaggcgttaaatggcctgattggcgctggggttccgcaggactgggcgacgcatatgctgggccacgagcttaccgcgatgcacggtctcgatcatgcccagacgctggctatcgttctgcctgcgctatggaacgaaaaacgagacgttaaacgtgcaaaactcctgcaatatgctgaacgtgtatggaatatcaccgacggttccgacgacgagcgtattgatgccgccattgccaccacccgccgtttcttcgaacagatgggcgtgcctacccacctgtccgattacggtctggatggcagcactattccggcgctactggctaaacttgaggcgcatggatgcataaatttaggtgaaaatcaggatattacgctggatgtcagccgtcggatttatgaagcggcgcgctaaggttttttcgcctctgactttcgtttttggccatttcgtccagacttaagtcacttagtctcgccggacccgactccggcgagccaattaaaagaggaacacatcatggctaatccaaccattatcaggctacaggatggcaacgtaatgccacaacttgggctgggagtctggaaagcaagcaatgaagaggtgatcgcggcgattcataaagcgctggaggtgggctatcgatcgattgataccgccacagcatatcagaatgaagaaggcgtcggcaaagcgctaaaagcagcgagcgtagcgcgggaagagctgtttatcaccaccaagttgtggaatgacgatcaaaaacgtccccgcgaagccctgcaggagagtctgaaaaaactgcagcttgattatctcgatctctatctgatgcactggcctgtaccggctatcgatcactatgtcgacgcctggaagggcatgatcgcgctgcaaaaagaggggctggtaaagagtatcggggtctgtaactttcagatccatcacctccagcgtctgatcgatgaaaccggcgttacccctgtgatcaaccagatcgagcttcaccccttgatgcaacagcgccagctacatgcgtggaatgcgacgcataaaatccagaccgagtcctggagcccgctggcgcagggtggcgaaggcgtattcgatcagaaagtgattcgcgaactggcggataaatacggcaaaacgcccgcccagattgttattcgctggcatctggactgcgggctggtcgtcattccgaaatccgtcaccccttcccgtatcgcggaaaactttgctgtctgggatttccgtctcgataaagatgaattaggcgagatcgcaaaactggatcaaggaaaacgcctcggtcccgatccggatcagttcggcggttaagccggatttatcgcacgccatgcccgacgatgtcgtcgggcttttttgcattccgaaacattaagaaacaattacgcgcatttaacagtatatttcccccacacacaagcgcagaattattctgattttgtgaataattattcatatttattatgaatttacttaatgcatataaaatatttatggatgtgtgattgtggcggaaaaaaatctcagggcgtcaaatggctcccattcattcttattctggttatcgccgccggactgtggcagctaacgcccccttccgggttaagcgcgccggcctggcattccgcgattatttttgtcgcgacgatcgcctctatcgtggcgaaagtgctgcctattggcgcggtcggtattattggtatcaccgtctttgcgctcgcctatgctgccggcgacaaaacggccagcggcgcgattaccacggccttgagcgagctgaacagttcgctgatctggcttatcgtcgtcgcctttatgattgcccgtgggtttatcaaaaccgggctgggtcggcgtatcgccctacaaatgatccgtctgttaggtaaacgaacgctgggtctggcttatggtctggcgtttgccgatctgatcctctctcccgcgatgcccagtaacaccgcgcgctgcggcggcgtgatttacccgatcgccgactcgctggcgcgcagctttgattcacatccggaagatgagtctcgcagcaaaatcggcacctttctgatcacctgtattggcaatgttaacgacgtcactgccgcactgtttatgaccggttatacgggtaacctgctggcggtaaaactggcggcgaacgccggcgttacgttgagctggggaagctggtttatcgccgcgctcctgccttgcctggtctcttttcttatcgtcccgctgctggtctactggctgacccgtccggaaattaaacatacgccggatgcgccggatttggcgcgcaaagagctggcgcaaatgggcagtatgacgcgcggcgagtggctcatgctggcgaccgtcggcgtgttgctggtgctatggatttttggcagctcgctcggcgtggatgccacgacggcctcttttgtcggtctctctattttattactgagcggcgtgctcacctgggaagacgttaaaagcgaaaaaggcgcctgggatacgttgatttggtttgccgcgctgctgatgatggctaaccagttgaagaaactaggattcaccagctggtttggcaacctgattggcgacagcatcggcagcacgatgcatggaaccagttggataatcatcctgctgctgcttaacgcagcctatttttatacccactatttttttgccagcggcaacgcgcaaatcgccgcgctgtatgcggtatttctgggcgtcggtctgcatctgaatataccggcggcgccgatggcgctcatgctggcgtttaccagcagcctgtactgctctcttacgcagtatacccacgcacgcggccccattctttttggcgccggctatgtaccgacgggcgtctggtggcgaacgggatttattatcagtctctttaatcaggcggtctttttgacagtcggcctcgcatggtggaaagtgttagggttgtattaaacgcttaacgcatcgataagcccctcggttaacggagaaatggaatgacctgcattttctgtcaaatagttgaaggtaaagcaccttgtcataaagtttgggaagatgagcatcacctggcttttttgtcgatttttccgaataccgatgggtttaccgtagtgatcccgaaaaaacattaccccagctacgcgttcgatctaccgccgcaggcgttagcggacctgatgctggcgacccaaaaagtggcgaagaaactggataaggctttcccggatgtcagtcgtacgggaatgttcttcgaaggtttcggcgtagaccatgtgcacagtaaattaagccccatgcacggtactggcgatttaacccactggaaaccgattgaatcgcggcagaataaatttttcgaacagtatgaaggatatctgtcgtcacacgatcatgaacgggctgatgatgaaaaactggccgcgctggcggccagaattcgtgaggcataaatacggagcacttctgccggatggcggtgtaagcaccttatccggcctacaaaactgtgctattcatagacctgataagcgcagcgccgtcaggcattataccttagattatatacttcttatctattttaatatatcaaccctggtaggttaaatattacggcgcgtggctaaatatttcgtacaaaaaccatccaggaatagcggcaataacacccattaaaattatccctgcaagagtcatttgcctgtcttcacgtttttccatattacatgctttaatagccattatgaatataacaacagctattatagcaattacgataaaacagggaataataatcatacccatgatatcccctcctctggggctgtatacaagcatcatgccttaatcattaaggtaatatataattaatttatacaatcaataatatttaaataaaatataaagctccccgtaatttagcaattactaaagatcgacacaatatatttagatgtctgttacttccagaaacattagcttccagaagcaacagattcaaaggtaattaacgccctgcgcctttcccgcgcttcttattcgcagcaagcccctgccgctgatgttccaccggcgtatgcttggtcaacgccgggcgcgtgttgcggttctggcgacgcgcttcgcgcatctcttcaatggtcggcgcaggcaccagacactcacggcgaccgccaatcaaatgctttttccccatcgcttccagcgcctggcgaatcagcggccagttcgccggatcgtgataacgcagcagcgccttatgcaggcgacgctgcctgtctcccttcggcaccaccacatcttcactcttataaccaattttacccagcgggtttttgccggtgtaatacatggtggtcgaatttgccaacggcgacgggtagaagttctgcacctgatccagacggaagcggtggcgcttgagccacagcgccagattcaccatatcctcgtcccgcgtgcccggatgcgcggagataaaatatgggatcagatactgctcttttccggcctgtttagagtaaaggtcaaataactctttaaagcgatcgtagctgcccatacccggcttcatcattttcgacagcggaccttcttcagtatgctccggcgcaatcttcagatagccgcccacatgatggctcgccagctctttaatgtagcgaggatcttctacggcgatgtcgtagcgcacgccggaggcaattaagattttcttaatgcctttcagctcacgggcgcggcgataaagattgatcgtcggcgtatggtcagtatccatatgcggacagatatccggatagacgcatgacaggcgacgacaggtctgctccgcacgcggcgacttacagcgcagcatatacatgttcgcggtaggaccgcccagatcggagatcacgccggtaaaccccggcaccgtgtcgcggatcgcttcgatctcgttgatgatagagtcttctgaacggctctgaatgatgcgcccttcatgttcagtgatcgagcagaaagagcagccgccaaagcagccgcgcatgatattgatcgaaaagcggatcatctcataggccggaatacgggcattgccgtaagccgggtgcggcacacgctgatacggcagcgcaaacacgctatccatctcttcagtggagagcggtatggcgggcgggttgatccagacatagcggtcgccgtgtttttgcatcagcgcccgcgcgcagccagggttagtttcgtgatgcagaatacgcgacgcatgggcgtacagcaccttgtcgcctttcaccttttcaaaggatggcagcaggatataggttttttcccacggcttcggacgcggcggctgcacggtaatcgctttagcttcctgctttttcggcgcgaccggcttgttatccgcgcacggcagatcctcgccatagggatggggaattggatcgattttacccggcgtgtccagacgagtggagtcgacgccgctccagcctggcagcgcttctttaaccataatcgcagtgttacgcacatcacgaatctgatcgatggtttcgcccattgccagacgatgcgccacttccaccagcggacgctcgccgttgccaaacatcagcatgtcggctttggaatcgactaacactgaacgacgcacagtatcagaccagtagtcgtaatgcgcggtacggcgcagactggcctcaatgccgccaaggatcaccgggacatctttccacgcttctttgcaacgctgggtatagaccagcgtggcgcggtccgggcgtttgcccgcgacgttatccggggtgtaggcgtcatcgtggcgcagcttacggtcagcggtgtaacggttaatcatcgagtccatgttgccggcggtgacgccgaagaacaggttcggttttcccagacgcataaagtcgtctttgctgttccagtccggctgggcgatgatccccacgcggaagccctgcgcttccagcatacgaccgcaaatcgccatgccgaagctcggatggtcgacgtaggcgtcgccggttaccagaataatgtcgcagctatcccagccaagttgatccatctcgtcacgtgacatcggcaaaaacggcgccggcccaaagcaggcggcccagtactgcggccaggagaaaaggtcgcgatccggttggatcagggagatagcgctcataatgcttccaaaacgattggcaaaaaaataatcaaaggtcggggattataagccgtatctatagcgaaaatgaaggagattatcgccttatatgcaggactggcgcgaaatagaaacaactttcaacggcctggcctgaggtgtttgaaattggtcttatgaatatcttcaaattggtatgcaattaattatacccacgtctaaaaacgcagtatcgtcataacaacaaaaagtaaaaaaacatcacattatcagtaatatataaaaaaacttcgctgaattgctcacgacactgtttttaccatgactttcttctgtgaaccagatctctttctttggtctattgattaaattaaattggctgacagaattcaggggataaagaacaccatcaccacgcctttccccaacgcaacaccttacgtatcagcaggttattaattaatcaacgataaccacaggaatcccaacctataaggaagcagatatgaaaaacacacgttcattcacaacatcagcggtattactggccggctgtttgctactggcatttccagcgctcgccaaaaccacgctgaaactgagccacaatcaggataaaagccacgccgttcacaaagcgatgagctatctggccgacaaagcgaaagcctattcggacggcgaattaaatattcgtatttaccccaacgccacgctgggcaacgaacgtgaatcgctggaattgatgaactccggcgctctgcaaatggtgaaagtcaatgcggcatcgctggagtcttttgcgccggaatatagcgtgtttagcctgccgtttttattccgcgaccgcgatcactactacaacgtactgaaaagcgacttagggaaacgcattctcgcgtcctccgaaagcaaaggcttcgtcggcttaacctggtacgacggcggcgcccgcagtttttacgctggtaagcccatcactcaacccgacgatttagccggtatgaaaatcagagtgcagcaaagccccagcgctatcgcgatggtgaaagctctcggcggcgtgccgacgccgatggcgcaaggcgaactctataccgcgctccagcaaggcgtggtcgatggcggcgaaaacaaccccgtggtttatgccgatatgcgtcatgcggaggtggcgaaattctattcccgcgacgagcacacgatggtgccggatgtcctggtcatcagtaccaaagtacttaacaaattgagcgataaagagcggaaggcgttatataaagccgcagatgaatccatgcagcaaatgaaagatgtcatctggcccgccgcggaaaaagaggcttatgagagcatgaaggccatgaacgcgactgttgttgatattgataaatccgcgttcaaacagcgtgttaagcccttgtttgatgagttccgcgcaaaagacgctcagtcagcgaaggatctggaatacatcgagaatatgtaaatctgccgggcagggttctcctgccctttacaggatgtaatatgcgaatactcaccaatgcactgaacaaaatactggccgggtgctgctgtattattctggcggtcatggttgcctgcgtatcctggcaggtggcggcgcgctttatattcaacgcgccaagcagcacgctcgacgaattcacccagattctttttatgtggatgattctgttaggcggcgtctataccgccggattaaaaaaacatttagctatcgatttgttagcgcaaaaactctcccgaacgcccgccctcatgctcgacagtatcattcaggtgattattaccgtgttcgcgctgatttttatggtgtacggcggtgatattattgttgaaaaagcggcgcacgtcagccaaatgtccccggtattaaaatggcctatggataaagtctattgggtcatgccgattagcggcgtcatcctggtgtactacaccattgtgaacgttattgataattatcatcagcgccatcttcgctaacgagggatatatggactttgaatatatttacccaataattgttttatttggcagctttgccattatactggcggtcggcgttcctattacattcgctatcgggctgtcgtccttattctcaatcctgatagcccttcccccggatgcggcaatctcggttatttcgcaaaaaatgaccgtcggtctcgatggctttacgctgctggcgatccccttttttgtgttagccggcaatatcatgaataccgggggaatcgcccggcgcctggtgaatctggctcaggcgttagttggccgccttcccggttcgctggcgcactgcaatattctggcgaacaccctgtttggcgcgatatccggctcggcggtcgcttctgcggccgcggtgggcggcatcatgtcgccattacaggaaaaagagggctactctccggcgttctctacggcgatcaacgtcgcttcggcgccgattggcctgatgatcccgcccagcaatgtgctaattgtctattcgctggctagcggcggcacctctgtcgccgccctgtttttggcgggctacctgcccggcatcttaaccgcgctggctttaatgacggtagcggcgctgtatgcccatcgccaccattacccggttgccgaacgcatcaacctgcggcagtttctgtcggtattccgcgattcgttgcccagcctgttgctgatatttattattatcggcggcattatcggcggcgtatttacgccaacagaggcctctgcgatcgcggtaatctatagcctggcgctggcggccatttatcgagaaattaatgtgagtaagttgcgcgatattctgctggattcggtagtaaccagctctattgttctcttactggtcggctgctcaatgggaatgtcatgggcgatgaccaatgctgatgttcctgaactgattaatgaaatgattaccagcgtgtccgaaaataaatgggtcatcttgctgattatcaatctcattttgttattcgtcgggacgtttatggatattaccccggctattctaatctttacgcctattttccttcccattgctcaacatctgggaatcgaccctgtccattttggcattattatggttttcaatttaaccatcggactgtgtacgcccccggtaggcactattttgttcgtcggttgcagtatcggcaaaatcagtattgataaagtcgtcaaaccgctattaccgatgtttctggcactctttgtggtcatggcgatgatttgctacttcccgcagttgagtctgctgcttcccacgctgtttgctccttcctgaaaaccctgacgggtctgcgctattcagacccgtactcggacgctttacgacgctggattcaccagcatttgcccaatcgagccgcggtcagccatttccagcgtctggctgttgaaatagaacgggaagtgcggccaggacggctgaccgtaatagaccagcagttcgacttgcccatccacccagacggtatctttccagcctctatcttccgggaacggcatagcgccgttgacgttacgaatcaggaaagagacgccctcaatatggaacgactgcggcatatcggcgcgtaccgtccagcgctcccaggtgccttgttgggcggtaatatcaatgcgattcacatcccacagttggccgttaatccccggatcgtcgccaagactgatgtcccgactgcggacaggcgcgccgctcatgatctccgtcggcaacagacgcatcggcagattatcggtcaccagcggcagcaatccggttggccgtaacgtcagcaccagggtcgaaaccagaatactggaaggctcaaagaaaccgcgaatccgatcgactatgctggccgcttccccgcaggtgatcgagacttcgtcgccgttggtcatatcaaccaggatttcacgtcgctcgccgggcgccagtgacaactgtttgacggaaaccggcgcaggtaaaaagccctgatcgcctgaaatcacatgcagcgcccggccatcgctcatctgaagctgatagcgccgcgagttcgaggcgttcaacaaccgtaaccgcacccagccgcgggacacttcgacataggggctttgcgcgccgttcaccagcagcgtatcgccgacaaaaccaccgcttcccggttcgctgtactccggcgtcccaaagttatccagccgtttatcctggataatgacgggaaaatcatccacgccgtaatggttcggaatgggcagcgttttactgatgtcgtcttcgaccagccacattcctgccaggccgttatacacctgctgcgcggtgcggttaggcgtgttagcgtgataccacagcgtcgcggcgctctgacgaatcggcaacaccggcgcccagtccgcgttcggcgacatcatacgcgccgggccacccatcagcggccccggcaccagtaaaccagcaaccgtcatggagacattttccgccaggcggttgctatagatgagtttaacgtcatcgcctttccagacgcggattgtcggccccagataacgaccgttcactccccagaccggcgcgcgcgtgccttgcgtaaaggaccagtgcgctcgctgtagcgtcataaacaacggctgcccgcgacgggactccagcaacggcggaacaggcaacggctgttgctgaccggcagcattcgccctgaggggaatcgcgcctgcacatagtgcgattcccgatgcctgaagaaactgacgccgactgaatgacatataagctccatgtaaaacaggctaaagagttgtgcctgaaaaaatgatttctacaataacagagtaaggctgcttaaaccttaccggtcgcttcacgttccgcaacctctttatcaagttccgcgattttttgctccattaacgcacggcagtgggccgccagctcgcgaacctgatctttaccatattcgctgacgtcgactggcggcagcatttccacaataaccagtccgttgttcaggcggtttagattgactttgttagaggtgttggaaacgcagacaggaatgatcggcacaccagccgcgatagccgcatgaaacgcgccggttttaaacggcagcagaccgcgtccccggctacgcgtaccttcagggaacatccagatagaaatacgacgctttttaaaatggttaaccactgccgcaatggtgctatgcgctttggcgcggttattacggtcaatcaacagattaccggtcagccagtacagttgcccaaaaaacgggatccaaagcaggctttttttccccaccgtcaccgttggcggctgcacaatattcgccgccgtgaccatatcataattattctgatggttagcaatatagatagcattgccatagttttccgcgtcggcgggtttgcggcactccactttcaggccaaacagcggggccagacggccgaacatatgtccaaacgtcgccacgtgttttgggttacgtgggctgaaaaggcagtaaatagaaccgaaaacacagaccagaatggagtaaataacggtaacaataagacgaaaaatatatagcataacaacctctgaaggcctaagagcccggcattctacgtcacctgaaattcaggttaggattttggtaagtgtggctctctggaaaaacgtattgttaatcgcaatgcacgaataaacaacggttttacgggaaattttaatgttaatccgatctgaaaccgtaggccggataagacgctactgcgtcgtcatccggcaacggcagagcgccggatggcggcttagatgccttgtccggcctacgggcgcccctgtcttactcttcgctgtcgccatgacttacgcgatgcggcgaatcaatctcaatgcgatcgatacgctgcaggccgcgcattaatgtgccacggcgtccgcgttcaccgaccaccttttgtaactcttcagggcgcagtttgattttgcgcttcccgacatggatagtcagagtgctttgtggcggcagcacgtacaggtgcgccagtccatcatcgcctttcgccgcttctgcagaggggatattaatgatcttattccctttgcctttcgacagctgcggcagagagtctaccgggaacatcaacatccgtccggcctgggtaatcgccagcagcatatcgtgctcgtcttcaatcaccagcggcggcatgacgtgcgcattttccggcagtgtaatcaatgtcttaccggcacggttacgggcaaccagatcgttaaacgtacaaacgaagccgtagcccgcatccgacgccatcagcagtttctggtcatcgccttccatcagcatatgctctacggtcgcccccggcggcagcgtgagtttgccggtcagcggctcgccctgcccacgcgccgacggaagcgtaatgggatcaatagcatagctgcgcccggtggtatcaataaacaccaccggttgattgctcttacctttcaccgcggctttaaagctgtcgcccgctttatagttaagccccggcgcatcaatatcatgacctttggcgctgcgcacccagcccatctgcgacagcacgatagtcaccggttcggacggcagcatatcgtgttcgctcatcgctttagcttcttcgcgctcacgcagcggagaacggcgatcgtcgccataggcatcggcgtccgcctgtagttcttttttcagcaaggtattcattttgcgttcggacgcgagaatgccctgcaactggtccctctctttttccagctcgtcctgctcgccgcgaattttcatctcttccagtttggcgagatggcgcagtttcagttcgagaatcgcttccgcctgggtttcgctgatgccgaaacgcgacatcagcgcgggttttggctcgtcttcgctacggataatctcaatcacttcgtcgatgttgagaaacgccaccagcaaaccttcgaggatatgcaggcgcttaagcactttctccagacgatagttcagacgacggcgcaccgtgtcgcggcggaacgccagccactcggtgaggatctccagcaggtttttcaccgccggacgaccatccagaccgatcatgttcaggttaatacggtagcttttttccagatcggtggtggcgaacagatggttcatcacctgttccatatccacacggttggagcgtggcacaatcactaaacgcgtcgggttttcgtgatccgattcatcgcgcagatcgtccaccatcggcagttttttattacgcatctgcgcagcaatctgctccagcactttcgcgccagagacctgatgcggcagcgcggaaattaccacagcgccgtcttctttggtccataccgcgcgcatacgcacggagccccgcccgttttcgtaaattttacgaatttccgcacgtggggtaatgatctccgcttcggtcgggtaatccggcccctgaacgatatccagcaactgatccagcgtcgttttcggctgctcaatcagcgtaatcgccgctttcgccacttcgcgcaggttgtgcggcgggatatctgttgccatgcccaccgcaataccggtggtgccgttcagcaggatgttcggcagacgcgccggtaacattttcggttcctgcatggtgccgtcgaagtttggcacccagtccgccgtcccctgaccgagttcgcttaacagcagctcggcgtatttggacaggcgggattcggtataacgcatcgccgcgaatgacttcggatcatccggcgcgccccagttcccctggccatcgaccagcgggtaacggtaagagaacggctgcgccatcagcaccatggcttcatagcaggcgctgtcgccatgcgggtgatacttacccagtacgtcaccaacggtacgggcggattttttaaatttagcggtggcgttcagccccagctctgacatcgcatagacgatgcggcgctgtaccggcttcaggccgtcgccaataaacggcaacgcacgatccatgatcacgtacatggagtagtttaagtaggcgttttccgtaaattcatgtagcgcaaggcgctctgccatatcgctcattaacaggggatcctcaatctgcatgctgaccgttcggacggcaatattgccgcagataataccctatctcacggtctgagtcacaaaccgtgagacaggtggcgaggaagttaacgaagcggcagatagatatccgtcagcagctcatgttccgcgacctcatggacgaaattcaggtactggaagaagaccggaaaatcgcgcggcgtctcaccgctggcgggtagccattcgcggaataaataccacacgctctccgggaggctgtcgagcgatccctgatggcgcaccaccgcgcagcgcccgccaggaatctcgctattcaccacgccaacgtcattttcggctatcggctggcggacgctgccgcagatatcaaagcggaattgagccggcggcgtcgtctgcgggtcgtgccaggcaataccaaaagtttgactgctggcaatcggcgactggcccgtttcgcgtcgccatgcaataaatttcgccgcgctggcgttgaccttatccggatgccccagatgcgtcagcatcgcgacgcgggtaggtggaaattcaacgatttttacgtccatgacatgctgctcctgtaacgcaagtttaggaacgcgctggtgccaggccagccagtccggcgattgccgaaaccggcgcgggctttgaccaaacgcggttttgaaagcacgtgtgaacgactccggattctgaaacccggcatccagcgcgatatcgataactttatcctgcgggttaaacgccagccgccatgacgcgcggcgcaaacgcaaccactggatatagcgatagagcggaagcccgctccaggtggtaaactgccggtgaaaatgaaacggcgagctgtgcgccatccggcttaacgcctcaatcgacagaggctcatccagatgacgctcaatgtggtcgcaaacgcgccgcagacgttcggaataagccgcgctgatcaggtcattcatcactgcctccttgtggcctattctgcccaccgggcggctgtgaatcctgaccgatcttgcgcaatgtgggattacggattcactttacgaatctgttttacgtcgatttcgacagagttccagtctttatccacttcgccctgaatttcaacggtatcctgcggggttacggtcaggccgttccagcgcttgtggtcaatgtccacattgatagtaccggtcgcatctttaaacacatacagatcgtcggaaatgcgctcgacgatattcccgcgcagcgttacccacgcatcgtcacgcagcgatttagcgctctctaccgtcgtgctgctgccgttcgggccgacaaatccgccgccttgcgtttgcgtcgccgacgggccggagaaaccgccctgctgagccgccagaaccggggtagaacacagtgccataacggcaacgattgcagctaattttttcatgattacttttccctttcatgtcgtttcagatccatttaataaggtaatccttaacaacttcttaaggcaaaaaaagaatctttttttctgtacatcgcctgcggcgacaaggttaactgacggcaacgcgagttaccgcaaggaagaacagatgcgaattttactggtagaagatgacacacttattggcgatggcataaaagcgggcctgagtaaaatgggtttcagcgtcgactggtttaccgagggacgtccgggcaaagaggcgctttacagcgcgccttatgatgcggttattttagatttgacgctgccaggcatggacggacgggatattttgcgcgaatggcgcgaaaagggtaaacaggaaccggtactgatcctgacggcgcgcgacgcgttagcagagcgcgtcgaggggctacgtctgggcgccgatgactatttatgtaaacctttcgcgctcattgaggtcgccgcccgtctggaggcgctggtacgccgcgccagcggtcaggccagtagcgaattgcgccacggccaggtgacgctcaatccaggcaatctcgtcgcgacgcttgccggcgaaccactggccctaaaaccaaaagagttcgcgttgctggaactcttactgcgcaacaaaggtcgcgtgctgccgcgcaagcttattgaagagaagctgtataactgggatgacgacgtgtccagcaatgcagtggaagtccatgttcatcatttacgccgcaagctcggcagcgaatttattcgcaccgtgcacggcatcggctacaccctgggtgacgcatgaaattgacgcaacgtctcagcctgcgcgtcaggctgacgcttattttcctgattctggtctccatcacctgggcaatctccagttttgtggcctggagaaagacgacggataatgtcgacgagctgtttgacacacagttgatgttgttcgccagacggcttagcaccctcgatcttaacgagatcaacgccccgcagcgcatggcgcatacgccaaagaaattaaaacatgggcatatcgatgacgatgcgctggcgttcgccatcttttccgctgacggcaaaatgttgctgcatgatggcgacaacggccaggatattccgtatcgctatcgccgggaaggtttcgacaatggctatctgaaggatgacaacgacctctggcgttttttgtggttgaactcggcggacggcaagtatcgtatcgtcgtcggtcaggagtgggattaccgcgaagatatggcgctggcgatcgtggcggcgcaattaacgccgtggctgatcgcccttcccttcatgctgctaattttattactcctgcttcaccgcgagctcagaccattgaaaaaactggcgcaggcgctacgcttccggtcgccggaatcggaaacgccgctcgacgccaaaggcgtaccgagcgaggttcgcccactggtcgaagcgcttaatcagctttttagccgcatccactccatgatggtgcgcgaacggcgatttacctccgacgccgcccatgaattgcgcagcccgctggccgcgctgaaagtacaaaccgaggtggcgcagctctcgggcgacgatccgctatcgcgtgataaagcgctgacccagctccatgcggggatcgatcgcgccacgcgactggtcgatcagctactgacgttatcgcgtctcgactcgctcaataatttgcaggatgtagcggagatttcgctggaagagctgctgcagtccgcggtaatggatatttatcatccggcgcagcaggcgaatatcgacgtgcgtttacagcttaacgcccatgacgtcatacgtaccggccagccgctactcttaagcctgttagtgcgtaacctgctggataatgcgattcgctacagtccgcagggcagcgtcgtcgacgttaccttacatgcccgcagcttcaccgtcagagataatggccccggcgtagcgccagagattctgacgcatatcggcgagcgtttttaccgcccgccaggccaaagtgtgaccggcagcggtctgggattatcaatcgtccgccgcatcgctacgctgcacggcatgacggtgtcgtttggcaacgccgcggaaggtggatttgaggccgtagtaagttggtaacagagacttttgccaaaaacgcaaaagactttgcacattttgctaatttcaccgcaccgcccgtcagcgtagaatcagcagcaaacgcatttcttgaggacacaaaatgagtaacatcctgattatcaacggggcgaaaaaattcgcgcactccaacggccagttgaatgacaccctgaccgaagttgccgatgggctgctgcgcgatctgggtcatcaggttaagatcgtccgcgccgacagcgactatgacattaaagaagaggtgcagaatttcgtctgggctgacgtggtgatttggcagatgccaggctggtggatgggcgcgccatggacagtaaaaaaatatatggatgatgtctttaccgaaggtcacggtacgctctatgccagcgatggccgcacgcgttccgatgccgctaaaaagtacggttccggcggtctggtgcaggggaaaaaatatatgctgtcactgacgtggaacgcgccgatggaagcatttaccgaaaaagatcagtttttccacggtgtaggcgtagatggcgtctatctgccattccataaagccaaccagttcctgggcatggacgcgctgccaacgtttattgccaacgacgtgattaaaatgccggatgttccgcgctataccgcagaatatcgcaagcatctgagcgaaatttttgcttaactggtcatcctggaattagaaggagttaaccatgcttaccgtcattgccgaaattcgcacgcgtccgggccaacatcaccgtcaggccgtcctcgaccagtttgcgaaaattattccaaccgttcttaaagaagaggggtgccacggttacgcgccgatggtggatcatgccgcgggcgtgagttttcagactctggcgcctgactcgatcgtgatgattgaacagtgggaaagcgttgcgcaccttgaggcacatctgcaaaccccgcatatgaaagcctacagcgacgcggtaaaagacgatgtgctggaaatgaatattcgtattctggaatccggcgtttaagttattaccctcgtctgacgtcgccctgatgcgatgcgcaagtgtcgccatcaggctgcggcgtcatgtcggattcgcttatccggcctgcggcatgcagaccagataaagcgtgcaacaaccgttacacgtcgagatccgcgagatcgcctttttcctgtagccagttgcgtcgatcttcagaacgtttcttcgccagcagcatatccatcatcgcattagtacgctgatcgtcttcatcgctaatggtgagctgcaccaggcggcgagtattcggatcaagcgtggtttcgcgtaactgcatcgggttcatttctcccaggcctttgaaacgctgtacgttcggcttgcctttcttacgcttcagttgttccagtacgcccgccttctcttcttccgtcagcgcgtaatagacctctttacccaaatcgatacggtatagcggcggtagcgcgacgtagacatgaccattcttcaccagcgcgcggaagtgtctgacaaacagcgcgcaaagcagagtagcgatatgcaaaccatcggagtccgcatccgccaggatacagatcttgccgtagcgcagctgactcagatcgtcgctgtccggatcgataccgatcgccacggaaatatcatgcacttcttgcgaggccagcacttcatcggaagagacctcccaggtgttaaggatcttacctttgagcggcatgatcgcctgatattcgcgatcgcgcgcctgcttggcggaaccgcccgccgaatccccttccacaaggaacagctcggtccgattaagatcctgcgcggtacagtccgccagtttccccggcaacgccgggccgctggtgagctttttgcgcaccactttttttgcggcgcgcagtcgccgctgcgcgctggcaatcgccatctctgccagttgttccgccgcctgcacgttctggttcagccacaggctgaaggcatctttcaccacgccggaaacaaatgccgcacattgacgcgacgacagacgctctttggtctgcccggcaaattgcgggtcctgcattttcacggaaagcacataagcgcagcgatcccagatatcttccgccgacagtttgacgccgcgcggcagaatattgcggtattcgcaaaattcgcgcatcgcgtcgagcaggccctggcgcagaccgttgacgtgcgtccccccctgcatggtcgggatcaggttgacgtagctttccgtcagtaattcgccgccttccggcagccacaatagcgcccagtcaaccgcttccgtttcaccgttaaaattaccgataaacggcttttccggcagcgtcggcaggccgtttaccgcttcgcccagatagtcgttcagaccatcctggtagcaccagcgctgctcgctgttattcacttcatctttaaaagtgatttccacgccgggacacagcaccgcttttgctttcagaacgtgcattaagcgagagacagaaaaacgcgggctgtcgaagaaactttcgtccggccagaaatggacgctggttccagtattacgtttaccgcaggtgccgacaacctgcaaatcctgcactttttcgccgttttcaaacgcgatgttatagacctgaccgtcgcggcgcacggtcacttccacgcgctttgacagggcatttactaccgaaatccccaccccatgcagaccaccagagaactgatagttcttattggagaatttaccgccggcatgaagccgacagaggatcagttctaccgccggaaccccctcttccggatggatatccaccggcatcccgcgtccgtcgtcaatcacttccagcgattgatcggcatgtaaaatgacatccacgcgtttggcgtgacctgccagtgcttcatccacactattatcaatcacttcctgacccaaatggttggggcgggtcgtatcggtgtacatccccgggcggcggcgtaccggctcaagcccagtgagtacctcaatggcatcagcgttataagtttgcgtcatggtttaattagcaattcgaattgattgtcagcaactgtgcagtccaagaaaatcgacaatctggttgaaataatcttcgaagcccgtgaatgcgtgattaccaccctcggtcactgtctgacggcaggaggcgtaatatgccaccgcctggcggtaatacagcacttcatcgcccgtctgttgcagtagccagatcaggtccggcgcttccagcgggtcaatctgcatgactttaagatcataaatatggcgagactctagcacatattgctgcccggtgtaggggttctcgttctgaccgagatagtcggtcagtaattcaaagggccgcacggcgggattcaccaccacagccggcagcataaaacattgcgacagccaggtggcgtaataaccacccagcgacgatcctaccagccctaatggcgcaccgccatgctcaagcacgagagattccagcaactccgccgcatcggcaggatacggcggcagctgagggacgatcatctcaacatgcggatgacgctccgccagccagttttttagctggcacgcttttgccgagcgaggggaactgttgaatccgtgcaaatagagaagcgtagacatcagtatccttccgaagcggtatcgggtcggaaccgggtatcctgcaggcgatgcacttccgtctccaggacgccgttcgcccggagctccagcgtacgccagcccggcgcgatagtatccagcgtaaagttcgcgcagtgcggtttgaactgtacgcaggttgacggcgacgccagcagacggcgaccgttccagtcaagatccagctcctggtgaatatgtccgcataacagatattttacacgcgggaaattcgccagcacgctatccagctcaccggcattacgcaagctgtgctgatccaaccaactgcaccctgccggcaacggatggtggtgcaacaggagcaatgtctgtctctctggcgcatcggcgagcttacgctcaagccattccagttggaactcgctcagttcgccatgcggaacgccaaacacctggctatccagcaacaaaatctgccattgttcaccgattaacacgcgtttagccggggaaatccccgcctcttgcagcgcgctgtacattgccggctgaaaatcatgattgcccggtagccaaacgcaaggcgcgcgaaagcttgcgataccctcagcaaaatgctgataagccgcagcggattgatcctgcgccagatcgccggtggccacgatcagatcatattcatactgttgcgcccgaatagcctccagcacggcctggtaactttcccaggtattgacgcctaacagcgtttcatgcttttcggcaaacaggtgagtatctgtaatttgtaaaatcctgactcgggcctcaccagccagaggtagggttaacaggctttccaaatggtgtccttaggtttcacgacgctaataaaccggaatcgccatcgctccatgtgctaaacagaatcgtagccagtcggccagaaactgattaatttgatgcttttcgtcgcgttgatgcaactttttatttggataatcataccgcgctttgaagcgaaagatctgctggcttgaacacacttcagccaccatcgcatcatggtagaggcgcaccgtcagcgacggcaggctccagtaggtgatggctggcgtcgtttgctcgatcgttacaagcgtagtgtatcgggtcgattccacaatcgttaaccgatattgtacgttgcccacctgatagctcaccgtttcaccgggggcgtcattgcgcggcagcaggcggcgcaattgcgaaaaattggtttcgcacaaacgcatcatttctgggaagtcaggtgtataacgcttcattttttccactcgttttttaactcttgatgatgcaactgaagccattgcaaagcgatgactgcggctgcgttgtcgattttcccctcttctacccactggtatgcctgttcccggcttaccacatgaacccgaatatcttcgttttcatccgccagaccatgaatacctaccgcggtcgtggcgtccacttcacccaccagaatagatgagcgctcgctggttcctcctggactcgccaggtaactgatgaccggtcgggtgcggcccacggtcagccctgcttcttccatcgcctcccgccgggcgaccgcctcaatggtttcgccttcttctatcatgccggcgaccatctccagcagccacggcgtaacgcttgtgtcatatgcggcaatacgaatctgttcgaccagcaccacctcgtcgcgttcagggtcaaagggtagcaagacggcggcgtgcccgcgctcaaaaatttcgcgctttacctcgccactcatttctccgttgaataaacgatggcggaatcgatacacatccaatgaaaaaaaaccgcgatagcgcgtttcccgtgcaataatttctacatcgcttttggtgaaagtaactggcaagttgtctgatttacgcattgtgctgccctgctagcaataatgattaaatgatgaatttcaagggtggttgactgctgttttatcacccttgtggtaaattggtgccaattaaggctcgtatggcacgtaacgccaactttttgcagtggcggattctgctagaatcagcaattatttttacaaattgatcagcgctaaatactgcttcacaacaaggaatgcaaatgaagaaattgctccccatccttatcggcctgagcctgtcggggttcagcacactaagccaggcagagaacctgatgcaagtttatcagcaagcacgcctgagcaacccggaattgcgtaaatccgctgccgatcgcgatgctgcattcgaaaaaattaacgaagcgcgtagtcctttactgccgcaactgggtttaggtgccgactacacctacagcaacggttatcgcgatgcgaacggtatcaactccaatgaaaccagcgcttctctgcaattaacgcagacgctatttgatatgtcgaaatggcgtgggctcaccctgcaagaaaaagcagcaggcattcaggatgtcacctatcagaccgatcagcagacgctgatcctcaataccgcgaacgcgtattttaaggtattgaacgctattgatgtgctttcctatacccaggcgcaaaaagaggctatctaccgtcagttagatcaaacgacgcaacgttttaacgtgggtctggtcgccattaccgacgtgcaaaacgcccgtgcgcaatatgataccgtactggcgaatgaagtgaccgcccgcaacaacctggataacgcggtagaagagctgcgccaggtaaccggcaattattacccggagctggcgtcgcttaacgtcgagcattttaaaaccgacaaacccaaagctgttaatgcgctgttgaaggaagcggaaaaccgtaacctgtcgctgttgcaggcgcgtttaagtcaggatctggcgcgcgagcaaatccgtcaggcgcaggatggtcacctgccgacgctgaatttaacggcctcaaccggcatttctgatacctcttatagcggttctaaaaccaactccacccagtacgacgatagcaacatggggcagaataaaatcggccttaacttctccctgccgctgtatcaaggtgggatggttaactcgcaggtaaaacaggcgcagtataacttcgtcggcgcaagcgaacagctggaaagcgcgcaccgtagcgtggtgcagaccgtacgttcttcctttaacaatattaacgcctccatcagcagcatcaacgcgtataaacaggcggtcgtttccgcgcaaagttctttggatgccatggaagccggttactcggtcggtacacgtaccattgttgacgtactggatgccaccaccactctgtatgatgccaagcagcaactggccaacgcgcgttatacctatttgattaatcagttaaatatcaaatatgcgctcggtacgctgaacgagcaggatctgctcgcgcttaacagtacgttgggtaaacctatcccgacgtcgccggaaagcgtagcgccggaaacgccagatcaggatgctgccgcagacggttataatgctcatagcgccgcgccagcagtacagccgaccgccgctcgcgccaacagcaataacggcaatccattccggcattgataagttattcgctggcgctgcgcttatcagacctgtgcccttgtaggtctggtaagcgcggcgctacctgtcataaagccgcgcctgaacgtaagacaacgtaaagatcctgctattccgccgcattctcgccttttctcgcttcaatttcgaccagtcatcctctattctgaaggcatgttgtatttaccactgggtcctggaagacaaatatgaaacggacaaaatccatccatcacgcatcatttcgcaaaagctggagcgcgcggcatttaacgccggtcgccctggcggttacggctgtttttatgctggctggctgtgaaaaaagcgatgaaaccgtatcgctgtatcaaaacgctgatgactgttcagcggcgaatccgggcaaaagcgcggagtgtacaaccgcgtataacaatgcgctgaaagaggccgaacgtactgcgcctaagtacgctacacgcgaagattgcgtcgctgagtttggcgaaggtcagtgccagcaagcgcctgcacaggctggcatggcgccggaaaatcaggcgcaggcccaacaatccagcggcagtttctggatgccgcttatggcaggttacatgatggggcgtctgatgggcggcggcgcaggctttgcgcaacagccgctgtttagctcgaaaaacccggccagccctgcatacggcaaatataccgatgcggcaggtaaaaactacggcgcggcgcaaccgggccggacaatgaccgtaccgaaaaccgcgatggcgccgaaacctgccaccacaacaaccgttacccgcggcggttttggcgaatccgtcgccaaacagagcaccatgcagcgtagcgctgccggtacttcaacacgttcgatgggcggctgatacgcatggaaagagtcagtattaccgagcgcccggactggcgcgataaagcgactgaatacgggtttaattttcacactatgtatggtgaaccgtactggtgtgaagacgcttattacaagttaacgctcgcccaggtggaaaaactggaagacgttaccgccgagttgcaccagatgtgcctcaaggtagtagaacgcgtcatcgccagcgatgagctgatgacgaagtttcgtattccaaaacatacctggggttttgttcgtcagtcctggcaaacgcaacaaccgtcgctctattcccgcctcgatctggcctgggacggcatcggcgagcctaagctgctcgaaaataatgccgacacgccaacgtcgctgtatgaagcggcgtttttccagtggatttggctggaagatcagatcaacgcgggcaatctgccggaaggcagcgatcagtttaatagcctgcaggaaaagctgattgaacgctttgctgaacttcgcgaacagtacggttttcagttgctgcatctcacctgctgtcgcgatacggttgaggatcgcggcaccattcagtatttacaggactgcgcggccgaagcggaaatcgccaccgaatttctctatatcgacgatattggtctgggggaaaaaggccaatttacggatctgcaggatcaggtcattgcgaacctgttcaagctctatccgtgggaatttatgctgcgcgagatgttttccaccaagctggaagatgccggcgtgcgctggctggaaccggcctggaaaagcattatctccaataaagcgttgttgccgctgttgtgggagatgttccctgaccatccgaatctgttgcctgcgtatttcgccgaagacgaacatccgccaatggataaatatgtcgtgaaaccgatcttctcccgcgaaggggcgaacgtatcgattattgagaacggtaaaacgatcgaatccgtggaaggcccgtatggcgaagagggtatgatcgtgcaacagttctatccgctgccaaaattcggcgacagttacaccctgattggtagctggctgattaacgatcagcccgccggaattggtatccgtgaagatcgggcgctgatcacccaggatctctcccgcttctatccgcatatttttgtcgaaggatagattctcctgtaagcccgatgcgcgtagcgccatcgggcaatcattcagcgccttatccggcctaccccacctgcaccgacaacatacttatactgcccatctcaataccgtcgaccgggatggtgataggttccttgccgtcccaggcgccaagtacatacagcaaaggcaaaaagtgctccggcgtcgggttcgataaggcgcccccttcatgttgcagataattcaccagcgggtgctgttctaccggcccctgccacgtcagattggctttcacaaagtcattaaatgacgccgcccagggatacggtatattgtcaccgtgccaacgcacagtccgcagattatgaactacattcccgctggccaccagcatcacgccttcgtcacgcagcgtcgccagcttacgacccacctcaaaatgccatgccgccggtttggtactatcaacactaagctgcaccatcgggatatccgcattcgggtacatcttgatcaatacgccccaggagccgtgatcaaatccccacgcttctttatcgagcgcgacgggaacgggagccaacagttcaaccagacgctgcgccagcgcaggcgatccaggggccggataatgcgtgtcatacagcgcctgcggaaaaccgccaaaatcatggagagtttgcggcctttccatcgctgtgacgccagtcccacgggtataccagtgcgccgacaccaccactatcgcctgtggtcgcggtagggcttcccccaatcgccgccaggcgcgggtataatcgttatcgtccagcacgttcatcgggctgccatgccccaaaaacaatgctggcatacacgttaaagacatgatgttatccttactggaaagacattttgttaacatcaccatacgctttcttcacagaggaagaactcagataaccatgatgaagatcatcagttattttgaaggtcaggttcggacggcaaattgataaggagtaatggatgtcagtaccacttattctgaccttactggcgggcgccgccacctttattggcgcgtttcttggcgttctcggccaaaaaccgtctaaccgcgtgctggctttttcgctgggcttcgccgcagggatcatgctgcttatctcgctgatggagatgctgcccgccgcgcttgataccgaggggatgtcgcctgtactgggctacggaatgtttattatcggcctgttgggctacttcgggctggaccgcctgcttcctcacgctcatccgcaggatctggtgcaaaaaaggcagcagccgcttcccggctcgataaaacgcactgcgattttattgacgctcggcattagcctgcacaactttccggaagggatcgccacctttgtcactgccagcagcaatcttgaactgggtttcggcatcgcactggcggtggcgttgcacaatattcctgaaggtctggcggttgccggcccggtttatgccgcgacgggctcaaaacgtaccgcgattttttgggccggtatctccggcatggcggaaattcttggcggcgtgctggcgtggctgattttgggcagcctggtttcaccgatcgttatggcggctatcatggcggcagtcgccggcattatggtggcgctctccgtcgatgaactgatgccgctggcaaaagagatcgatcctaacaataaccccagctatggcgtgctttgcggtatgtccatcatggggctcagtctcgtcattttgcagacgataggtatcggttaagagaaacgtcgcgccggatgcaggcctttagccaggcaacatccggctgcccgtcaaggatatgcgctatttctgctcattcatcacgctgtcgccttcgctcgtctggcgaaaacgtttcgttcgcgcttcaagtaatgcatctctgtcttgccgaaacgctctgcaataacgcttcatatggcaaatataccctactaccaccagaacgattaatattatccaataccaggcaataaacatcctttttacccttaaaatttaacatcactaaacatttaacgttaaaattttacatacccttattttgacgtattcatatactggcatatttgtggaacaaataaatgattttgatcatataaatcagtggtgaaacacaataatgaaagaggtattaagcagaaaacaatgtcgataagatcacacttcgtactaatttatattgttcttaaaatatcacactcctactatcgactcactcaggcaattaaaaaatattgatacagaatatactttaaaataagtaacagcatcatgacttatatttaaagaccaatcatttacctcatttattattcataaaaacatagtatattcagaagtattatatttagaagttgtatataaggagatatatccatgtttgaccaataccggaaaacaatacttgccggtgccgtcgcactgacatgcggactcaccgcagccagtacgtttgccgcaggttttcaaccggcacagcccgcaggaaaattaggcgcagtcgttgtcgatccttacggaaatgcccctctcaccgcgctggtggaattagatagccatattatttcagacgttaaagttactgtacatggcaaaggggaaaaaggcgttcctgttacttataccgttgggaaagagtctttagaaacctatgacggtattcctatttttggcctttatcagaaatttgccaacaacgtcacggtagaatataaagaaaacggcaaagccatgaaggatgactatgtggtgcagacgtccgccatcgtcaaccattatatggataaccgttctatttcagatctccagcaaacgaaagttattaaagttgcgccaggatttgaagatcgcctttatctggtaaatacccatacctttacgccgcagggcgctgaatttcactggcacggcgaaaaagataaaaatgcgggcattcttgatgccggcccggcgggcggggctttgcctttcgatatcgccccttatacgtttgtggtcgacacccagggtgaatatcgctggtggctggatcaagataccttctacgacggccacgatatgaatatcaacaaacgcggctacctgatgggtattcgtgaaacgcctcgcggcacctttaccgcggtgcagggccaacactggtacgagtttgacatgatggggcaaattcttgccgatcataaactgccgcgcgggttcctggatgcgtctcatgaatccatcgaaaccgtgaacggcaccgtactgctgcgcgtcggcaaacgagttaccgcaaagaagacggcatacatgttcatactattcgtgaccaaatcattgaggtcgataagtctggccgcgtagtagacgtttgggatttaaccaaaatcctcgaccctatgcgtgatgcgctgctcggcgcgctggatgcgggcgcagtatgcgtgaacgtcgatctggcccatgccggacagcaggcgaaacttgaaccggatacgccgtatggcgatgcgcttggcgttggtgccggtcgtaactgggcgcacgtcaactctatcgcttatgacgcgaaagacgactccatcatcctttcttcccgccatcagggtattgtaaaaattggtcgcgataagcaggtgaaatggatactggcaccgtctaaaggctggaataagcagctagccagtaaattgctgaaaccggtagacgatcatggtaagccgttgacctgtgacgaaaacggcaagtgtaaggacaccgatttcgatttcacctatacccaacatacggcatggctttccagcaaaggcacgttaacggtctttgataacggcgatggtcgcggcctggagcaaccggctctaccgaccatgaaatattcccgttttgtcgaatataagatcgatgagaagaaaggcaccgtacaacaagtttgggaatacggtaaagaacgtggatatgatttctatagtcctattacctcggttgttgaatatcaaaaagaccgcgacaccatgttcggctttggcggttctattaacctgttcgacgttggtaaacccacagtcggcaaactgaatgagattgactataaaacgaaagaagtgaaagttgaaattgatgtgctgtcggataaacccaaccagactcactatcgtgcattactggttcatccaacgcaaatgtttaaataaataacgggaaggaattaatatgtcatctaaatggattacctctttatttaaaagcgtagtattaaccgcagcattggtcactccttttgcggcatcggcttttaccgagggcacagattatatggttctggagaaaccgattcctaatgcggataaaacgctgattaaggtatttagctacgcctgccctttctgctacaaatatgacaaagccgtaacaggtccggtttctgataaagtagccgatctcgttacgttcactccgttccacctggaaacaaaaggcgaatatggcaaacaggccagcgaagtatttgcagtcctgatcgccaaagataaagctgccgggatttcgttatttgatgctaaatcacaattcaaaaaagcgaagttcgcctggtatgcggcttaccatgataagaaagagcgctggtcagatgggaaagatccggcggcatttattaaaaccgggctggacgccgcaggcatgagccaggctgattttgaagcggcgctgaaagatcctgccgttcaggagacgctggaaaaatggaaagccgcctatgacgttgccaaaattcagggtgttccggcttacgtcgtcaacggcaagtaccttatctataccaaaaacatcaaatccatcgattctatggctgaactcgttcgggaactggccactaaaaaataagcagggaaacgattatggattttattaagggattatggcgagacctacgcgcaagaccagtggatacgctggtgagatggcaggaacagcgctttctgtggctgttaatggccatcgcgatgggaggattaattatcctggcgcactcgttcttccaaatctacctctacatggcaccgtgcgagcagtgtgtttacatccgttacgcgatgtttgtgatggtaattggcggggtgattgcggcgataaatcccaaaaatatcgtgctgaagctgattggctgcatcgcggcgttttatggcagcattatgggcattaagttttctattaagcttaatggtatccatcatgcggtacataatgcggaccccgattcactttttggcgtgcaaggatgttcgactgacccgacctttcctttcaacttaccgttggcggaatgggcaccggagtggtttaaacctaccggagactgcggttatgacgcgcctatcgtccctgatggcgtaacgctcagtagcgtacagcagtggtttgtcgatctctaccagcagtccgaaggctggtatctgcttccgccctggcactttatgaacatggcgcaggcatgtatgttggcctttgggttgtgcctgattctgctgctggtgatgagcggcgcctgggcattgaaactggccagaggcaaataacctgaatagataaaccaaagcagaggtctgcattcaggcctctgcttttctcacaataattttaccattcagcttattcgtcgttctttgaaactgaacgatatggcaccgaaggaatacaaaaaagccgatgacatctcatcggcttttttcaaccatgatccgttcgatcagctggctttgcgctcatgcgcctggcggtaagccaccagatcttcaatcgtgactaccgccatattatgctggcctgcaaacgcgatacactccggcgcgcgcgccatcgtcccatcgtcgttagtcaactcgcacagtacacctgcaggtttaaaaccggccagcgtcatcagatcgatggtcgcctccgtatgaccgccgcgcgtcagcacgccgcccgcctgagcgcgcagtgggaaaacgtgccccggacggttaagatcggacggttttgcgccatccttaattgccgcacgcaccgtagtgacacggtcagcggcggaaacgccggtggtcacgccttctgcggcttcaatggtcacggtaaaaccggtgccgtaggcgctggtgttgttttccaccatcattggcaagtcgagctgcttacgacggtcttcagtaatacacaggcaaacaataccgctaccgtgacgaatggttaacgccatctgttctacggtcatcgtctctgcggggaaaatcatatcgccttcgttttcacgatcttcatcatcaagcaccatcacaccgcgtccttcacgcagcgcatccagtgcaagttcaacacgttcaaaaggcgtaccaaaagaggaaagtagcgtctgattcatggtaaaaaaacctcattaatattatggttaccagaatcagggcagtcttaggagtgccgacaagcggcaaaaaaataacgtgagcgggtccatgcccgactggatcgttaccctctcccatccggactttaaccgtcggccccggaattacaccggatctgctgaccttttcgctatggcaaaaagcgctcgcgggctttcaacctgctctccgcgttccgtcacggcgcgccgtgatgagaaatgcgttaaacatcgctgatttaccgccggtggggaatttcgccccgccctgagaataagcgggttaactataacgctattgattaccttcatcaacgcctttactccgtatgacgtcacacaattctggtttatggcgtccacatatcgcactacaataagagctaacacttaccagttcagggaaaccacaatgattgacccgaaaaaaattgagcaaatcgcacgccaggttcatgagtcaatgccgaaaggtattcgcgagttcggggaagatatcgagaaaaaaatccgtcaaacgctgcaatctcagctgacgcgtctcgatctggtgagccgcgaagagtttgatgtccagactcaggtcttgctgcgcacccgggaaaaactggcgctgctggagcaacgcctcagcgaactggaagctcgcgacaagcctgaagaagtaaaacctgcgcccgccattccgccagtcgatccacaacaagagtaaaaacgtgaacgggcctgacggcccgctcatataagatctgaataatgccctgcacctgtaaagggagcctgcattagtgttctaattctaaccttttcgcctgagtcgcctgctggcagtaaagcgcgtaacgcttgcaaaaccagtcgcgatgctcctcgtccatattgccggttaccgcctggatatcaacaggacgcccctccgcctgcattctggcaaaactgcgcgccagaaaatcgaaattatttaatgaatagacgttattgttgttcatcagcataccctccagttattgaattctgttaaggctatatgctttttctgatttcagtatttccctatatgtacggcggttttatacataacgtgcgcaaatttaatgcgcaaaatcacaatattcaccaaagataacgacggataaatcgcttttcggacttaaggagatatgggtcacatgatattgtaacgcaatgaaataacaagcatgaaaattatcacgcgaacatccttctgaaggcggcgacaaggatagaaaatatgaccttatttgcggagtataacagcccctatctgtttgccatcgcgttcgttttctttatcggcgtgctggagatgatttcgctgatttttggccactttctttcaggcgcgctcgacgcccatctcgatcattatgacgccctgtcatccggccctgcgggccaggcgcttcattatctgaatattggacgcgttcccgccctggtcgtcctctgtctattggccggttatttcggcctcttcggtatcctcatccagcatggcgggatcatgctctggcaagcgccgctcagcaatctgctgctggtcccgttgagcattgtcctgtcggtctttgccgtgcattacagcggaaaaatcctcgcgccctggctacccagagatgaaagctccgccctccgggaagaggaatttatcggcggcatggcgattattaccggccacgccgccgtcgccggtacaccttgcgaaggaaaatttaccgataagttcggccagattcactatttactgctggaacccgaaaagggaaaagaatttaaaaaaggagacaaggtgctgattgtctgccgactttccgcaacgcgttatttggctgagcgtaccttctatgtttaattgagaggaacttacataatggatgatgtttttggcatattgccatcatggatgtttaccgccatcgttgcggttatcgtcttactaattatcgggatcatttttgctcgcctctatcgccgcgcatctgcggaacaggcatttgtccgtaccgggcttggcgggcaaaaagtggtgatgagcggcggcgctattgtgatgccaatctttcacgaaattattccgatcaatatgaataccctaaaacttgaagtcagccgtgctaccgtcgacagcctgatcaccaaagatcgtatgcgcgttgacgtggtcgtcgctttcttcgtacgtgtaaaaccctctgttgaaggtattgccaccgccgcacaaacgcttggccagcgaacgctgtcgccggaagatctgcgtatgctggttgaggataaattcgttgacgccttacgcgctaccgcggcccagatgacgatgcatgagctacaggatacgcgtgaaaacttcgttcagggcgtacaaaacaccgttgcggaagatttgtcgaaaaacggcctggagctggaaagtgtctcattaaccaactttaaccaaacgtccaaagagcatttcaatccaaacaatgcctttgatgccgaaggtctgacgaaactgacgcaggaaaccgaacgccgccgtcgtgaacgtaatgaagtggaacaggatgtggaagtggcggtgcgcgaaaagaaccgcgacgcgcttgagcgcaagctggaaatcgagcaacaagaagcctttatgactctggagcaggagcaacaggttaaaacccgcaccgccgaacaaaacgctaaaattgccgcttttgaggccgagcgccatcgtgaagcagaacagacgcgcattcttgctgagcggcagatccaggagacggagatcgaacgtgagcaagcagtacggtccaggaaagttgaggccgagcgtgaagtacgtattaaagagatcgaacagcaacaggtgacagaaatcgccaaccagacgaaatctatcgccattgccgccaaatccgagcagcaatcgcaagcggaagcgcgcgccaacgacgcgctggccgatgcggttcgcgcccagcaaaacgtagaaaccacccgccagaccgccgaagcggatcgcgccaagcaggtcgctctgatcgccgcggcgcaggatgcggaaaccaaagcggtcgaactgaccgttcgggcaaaagcagagaaagaagcggcagaattgcaagccgccgctatcatcgaactggcggaagcaacgcgtaaaaaaggtctggcggaagccgaagcgcaacgggcgctgaatgacgctatcaacgtactatctgacgaacaaaccagcctcaaatttaaactagcgctcttacaatcgttgcctgctgttattgagaagtctgttgaaccgatgaaatccatcgacggcattaagattattcaggtcgatggcctcaatcgcggcgcgacggcgggcgacgtcgccgctggcggcgctaacgggggaaacctggcggaacaagcgttatctgccgcgctcacctatcgtacccaggcaccgctgatcgattcgctgttaaacgagattggcatcgctggcggctcgctaaaggcgctgaccacgccgttggtttcatcggcaacggatgagattaatcgcgaagcaacgataaaagagcaataaccccccgccatatctcctgtccctggtcataagaccggggatttttttatcttttttccaccttgtctgtacaaagcgttatgaccagcaggccattttgcgtgggcgatccagtaacgcaaaatcggcgggagaaagcccttgcgccagacaggccactcaccaacaatcgcgatgtcagcaaggggctgaaacgggaaagcccctcccgaggaaggggctttaataaggaaagggttatgatgcaccaggtcatcatactgattgttctgttactgataagtttcgcagcttactaacagacaatcagagggggggagagatcccctctcacccttattcctttactttaggtcgaaaaaaaagcagcgtcaaccgcgagatacgcgtcgaaacaaaatgtccgacgcgccttcaaaatcagcgcccgccgcgtctgtaacgcctgatgacgcggttttacttctcgctctcggtctggatctttttgatgatattggtcgtggaacaaccatcttcgaagttcagcaccatgacttcaccgccgttggcccagacctcttcgctgcccgcgatctcttccggcttatagtcgccgccttttaccagcagatccggcagaataccggcaatcagtcgttgcggcgtatcctcttcaaaagagacaacccagtcgaccgactccagcgcgcctagcacgatcatacgctgttcgagcggattaaccggacggctttcgcccttcaggcgtttagtcgaggcgtcactattgaccgcaacaatcaggcggtcgcccagtttgcgcgcgttcgccagataagagacatggcccgcgtgcagaatatcgaaaacgccgttggtcatgaccactttctcgccacgcttacgcgcgctggcgacggcctgtctcaactcctcttcggtcataacgccgaagccggtatccgcgcgtccgcgcactgcgttttccagctcaataggggaaaccgttgacgtcccgagtttacctaccactacgcccgccgccgcattggcgaaataacacgcctcttccagggtatttcccgccgccagcgtcgccgccagcacgccgatcaccgtatcgcccgcaccggtaacatcataaacttcctgcgcctgcgtcggcatatgtagcggcgctttattcggttgcagcagcgtcattccctgttcggaacgcgtgaccaacagcgcggaaaggtcgtaatcagcaatgagtttcatgccgcgttcaaccagttcgtcttcgcttttacatttccccgcgaccgcctcaaattcagaaaggtttggcgtcagcagcgtggcgccgcggtaacgttcaaaatccgttcctttcggatcgatgagcaccggcacgcccgcctggcgcgccagggaaatcatagtctgcacgctggtcagagcgcctttggcataatcggacaataccagcgcgccgatcgatcccagcgcctggttgatacgctcatgcaacggctgcgggtccacgccctcaaagccttcttcaaaatcaagacgaatgagctgctgattacgtgatagtacgcgcagtttggtaatcgtcggatgcgtcggcacagaaacgaagtcgcacttcacattgacctccgccagcgttttgctcagcgcgcgcgcggcgtcatcaatacccgtcaggccgaccagacgggcgttcgctcccagagacgcaatgttcatcgccacgttcgccgcgccgcccgggcgttcctcaacggtatttaccttaaccacgggcaccggcgcttccggtgaaatacggcaagtggggccataccaatagcgatccagcattacatcacccacaaccatgacgcctgcacgttcaaacgctggcagatttactttcattcctgtctcctgagagattcaaaatttgcgcgcgataatagcataattcaaacggctaccagccacttccgccagcttgcctgcaccagcgcgcgctctttgctaaaacacgtctgcgccacatgaccgggaagctcctgcaacgccaggtggtgcagttcatcacgcagtgtggtgtaggctaccgtcagcgcctgcgcctcgtgttcatccataatgccgttttgcgccagaagctccaggatgcgcacgttatcagaccagcgcgttaatttaggtttttcatgagcgtagcgcagtaccagatattgcgcgataaactcaatatccgtaataccgccttcatcagctttaatatcaaaacgatcacgatgcttattgccgagatgcgcccgcattttctcgcgcatttcacgcacttcagtctgcaatgtcttgccgtcgcgcgccgtcgtcatgatagtgcggcgcaccgcatcaaactgtgaggtaagctgcgggtcgccatataccacgcgagcgcgtaccaatgcctgatgttcccaggtccaggcttcatgctgctgataatcggcaaacgcgtccgctgaagtcaccagcattcccgccgcgccagaggggcgtagacgcgcatccacctcatacaaaatgccggaggaagtgcgcgtactgaacagatgcataatgcgctgcgccaggcgcagataaaactgccgcccgtcgatttcgcgttcgccgttggtcatgacgtccatcggacagtcatgcaggaagatgagatccagatcggaactgtagcccagctcccatccgcccaacttgccataaccgacaaccgcaaacccccgcccctggcgctcgtccagatgcgctggctgaccataacgcgcaaccatttgcgtccacgcctgctgcaccacagcatcaatcatcgcctccgccagccatgtgaggtgatcgcttactttcatcaccggcagcgtaccggcaatatccgccgccgcaatccgcaaaagctgtgcctgtttaaactggcgtaatgcctccagttgttgttcttcgtcctcttccggcacgcgcagcaaatattggcgtaattcgtcgcggtaagcgtcggtagccgtcggctgataaagcgtgccggggtcgagcagttcatcaagcaacaacggataacgcgccaattggctcgctatcattggcgaagcggcgcagagcataatcaggtgtttcagcgcgccgggaaattcgctcagcagctccagataggtggtgcgagtgacaatccccgccagcaacggcgttatccgcgatagcgtaacagcggcgtcttcgcgagaacagacatcagcaagcaggtgcggcatcagttggtccagcacttgccgcccgcgcgggccgatagggcgtttatccagttccttacggaagtcagcgatgagggtcagaacctgtcgccgctcctcatcggctaaatgcgccagcactggcgtcgaatcatcctcctgtagcgcatcctgccatacttcacgccacggctctgaacgttcttcctcctgcggggtatcggcttcatcatcgccaattaattcgttgaatacgcggcgtacattagccatatgatccgtcagttcaccaacaagctgcggccagttctccgccttcattccccaggccagccgcgcccgattcagatcgtcggcaggcaacgtttgcgtctgttcgtcattgatgctttgcagcagattctccagacgacgtagaaaaagataggccacgcgcagttgcgccacgtcattctcaggcagcaaatgcagcgcagcgatagcatccagcgtcggcagtaacgaacgcgactgtagcgacggctcgcgtccgccgcggatgagctggaatacctgcacgataaactcaatttcacgaataccgcccgcgccaagtttaatgttgtctttcaaaccgcggcgtcgcacttcgcgggcgatcatccctttcatattacgtagcgactggatgacgctgaaatcgatatagcggcggaaaacgaaaggccgcagcatggcgcgtaattcacgagaccaggcgtcgtcgttatcgcccattagccgcgctttcaccatggcgtagcgttcccagtcgcgtccttgctcctgatagtaatcctccagcgcggcaaaactcagtaccagcgggccgctgtcgccaaacggtcgcaggcgcatgtccacccgatagacaaaaccgtccattgtgggctgatccagcgctttgatcagccgctgcccgagacgcgtaaaaaactgggcgttatcgagttcacgacgcccgccccgggtctcgccatgttccggccaggcgaaaatcagatcgatatcagacgaaaaattcagttcgccgccgcccagcttgcccatgcctaaaatcaacagcggctgcggaacgccctgcgggttacagggggttccccattcgcggcaacaggcggcatacagccagtcgcgcgcccccacaatgagcgtctccgccagatggctcaactgttgtaaaatagtctcatcgtccaccagcgacagcgtctgtgcccaggcgatgcgtaccatgatgcgacgacgaaaaaacctcagttcacgcatcagcgaggcgtcgtcacagacacctgccaacgcctcctgtaaccagccagcataatgtcgccattcatcagcctgcggcgatgcggattccagttcggcaagccactccggatgcgctatcacgctatccagcgcaaaatcgctaaatgtaagtactgacttcgcctgcacgctaagcgatgtctcagtaaatccttctggtaggcgctcaacaacggtctgccagtactgcgataagggtgaagagagcggcgtcatttaggggatatcctttaaataatgccgggtggcggcgtttcgcctgatccggcctacaagtccgcataccgtaagcctgataagcgcagcgtcatcaggcgctttctacggttctgattatcgttttccgctgtgcaaccagaacggctgctggttgatggcctcattacggaaatgttcaatttcaatacgttgcccggtaataatggcgtgacgcaatccctgccagttctccagccatgcctgcgcgaccatcgcatcataatacccggccagcagtaaaacgctgtcaatatcgcgagtcaaacgcggcaactggtcgcgatatttatcacccagcggttgtccaaaaactttttttaattcagcagcatgacgagaaagatgaatgtcggcgaaacgcttaaaagaatcggccattttggcctgcgccttcgcgtccagaaatggctgccaggctttcgtcaccagccattccgtcaatgccagtttcgccatcgccgtttgcgtactataaacggctgtgacggcggacaccgcggatgtcatcgtcgcttccgcctgggtaagtagatcacgtaagtgagcgctcgctttacgcggaacaatgccaccaaagagcattaaggcatggcgcaccaaccccatagcatccagcacgtgttctttcgccgacttgtcgccgcgcagccagagctcttcatggtactgccactgtgacaacgccagatccagcgaggcctccagcccttgctctaccgtggctttcgcggcggtccgcagaattgtcgttggtgtattctctcgcggcgcattcccctgcgccaggtgataacctcgcgccgccttactcagactgccctgacgcaaaccggtttgcgacagcagttgcttcgccagttttaacacggcgcgcgtatcgccgcgaagcaactcaagctccagctcacaaatcggttcggcaaactcgcccgcttttacgtcgccgagatcgagcgcaatttcaatcctgctgccgtcaacgtccagacaccatttttcccggtaaaaatcggtactgaacagcggctgtacgcttgatgccaggccggcgggcaggttgccatccggccagacctccgccggaagttgcgtcagatccagcacgggttcgcttagcgcgacattgtattcgggtcgctggtgcagcccccccgttacccggccggcaattttcatggtcatttcatagcgcccattttcaccacgaatacgcagccccatatcatggcggcgtagccagttatcaggcgtttcgaagtagatattcagcaactggctgggcgcatgatgctcgccgccgagcgtatgaagatgatttcgcagcgcatctacggcgtcgtgattgacgataaactttaattcgatttcctgagccatggccttgtacttatgggttatgtcacatctgggaagattcttggcgaacttacccgcattatttttgtcagtagatagtattttgcgccaaattgccatgcaacgagcaatttgacgggcgtaaaagtttgacgtagcggcaaaggcgacacagatgattccgattgatgtcgactactttgcgtagcgacactgatgccgttactatcgttccactttctctgacaataacgacagcctgatgccaaaattacgcctgattggactaactttacttgcgcttagcgccaccgccgtctctcatgctgaagagacgcgttacgtttctgatgaactgaatacctgggtccgcagcggtccgggagataattatcgccttgtgggtaccgtcaacgccggcgaggaagtcacgctcttacagagcgatgccaactatggtcaaatcaaagacagttctggtcgtactgcctggataccgttaaaagaactgaataccacgccaagcctgcgtacccgcgtgccggatctggaaaatcaggtcaaaacgttgactgataaactcaacaatattgataccacgtggaatcagcgcaccgccgatatgcagcagaaagtggcgcaaagcgacagcgtcatcaacgggctaaaagaagagaaccagaagctgaaaaacgagctgattgtcgcgcagaaaaaagttagcgccgcgaatctgcaactggatgacaaacagcgcaccattattatgcagtggtttatgtatggcggcggcgtattgggtattggcttgctgttagggctggtgctgccgcatatgatcccaagccgtaaacgcaaagaccgctggatgaactaaatcgccttctctgcggcactgtcttatcattagaggatgatcgtttttaaaaggaaagtggcgtgaagatttatctggtcggtggtgcggttcgggatgcgttgttagggctaccggttaaagataaagattgggtcgttgtcggcgccacgccgcaggagatgcttgatgcgggctaccagcaggtaggccgtgattttcctgtgtttctccatccgcaaactcacgaagaatacgcgctggcgcgtactgagcgtaaatccggttccggctacacgggcttcacctgttatgccgcgccggacgttaccctggaagccgatctccagcgtcgcgatctgaccattaatgctctggcgcgcgacgatgccggccagattatcgacccttaccacgggcgccgggatctggaggcacgtctactgcgccatgtctctcccgcgtttggcgaagatcccttgcgcgtattgcgcgtggcgcgttttgctgcccgttacgctcatcttagtttccgtatcgccgatgaaacactggcgctaatgcgcgaaatgaccgcggcaggcgagctggaacatctgacgccggaacgggtatggaaagagacggaaaatgcgcttaccacccgcaatccgcaggtttacttccaggtattgcgcgactgcggcgccctgcgcgtcctgtttccggaaatcgacgccctgtttggcgtacccgcgccggcaaagtggcatccggaaattgataccggagttcatacgttgatgacgctgtcgatggccgccatgctcagtccgcagcttgatgtccgtttcgccacgctttgtcatgatctgggcaaaggcttaacgccgaaaaacctctggccgcgccatcatggccacggcccggcgggcgtgaaactggtcgaacagttatgccagcgtttgcgcgtccccaatgacctgcgtgatttagctaaactggtcgccgaataccatgatctgatccacacctttccgatactccagccgaaaacgatcgttaagctgtttgacgccattgatgcatggcgtaaaccgcagcgcgtcgagcagattgcgctgaccagcgaagccgatgtccgtggacgtaccggatttgaagcgtcggattacccgcaggggcgctggctgcgcgaagcctggcaggtggcccaagcggtaccgacgaaagaggtggtggaggccggatttaagggcattgagattcgcgaggagctgacgaagcgacgaattgcagcggtcgccaactggaaagagaagcgctgcccgaaccccgccagctaaacgccatccggcacgataaattgcctgatggcgctgcgcttatcagaccgacaaaacagttaggccggacaaggcggtactccgccatccggcacggtcaatcatcagaagaagacaacgtaaacggcagccgccaccacaaagcggtaaatcgcaaacggaataaacgagatacgcttaatcagttgcaggaaggtcttgatagcgatcagcgccaccacaaacgccgtcacaaagcccaccgcgaacattggaatatccgctgcggtcaggaatgaccaacttttgtagagatccagaaccgttgcgcccatcatcatcggcacagccagtaagaacgagaactcagaggcggcgtaacggctgacgcccatcagcatcccaccggaaatggtcgctccggaacgcgagaagcccggccacagcgccagacactggaaacagccaatcataaacgcctgacgatacgtcatatcatccagccccggcgcgcgcggttctttcggcttcaggcactcggcggcaatcagcaacagaccgcctaccaccagcgcgtacatcacgttaattgggttaaatagcgacttgatcgtgtcatgaaagactaaccccagcaccaccgccggaatcatgcccagcaggatgtgaatcaacgttaatcgacctttactttcaccttcacgctgtagcgggcggccaaagtgaataccgatgagaccaaacaaccgccgccagaacatcaccacgaccgccagaatagatccaagttgaatcaccacttcgaatgtcttggccgtatcgccttcaaaccccagcagatgacccacaataatcatatggcccgtgctggataccggcaaaaactccgtcaatccttcgaccacacccaaaattgccgctatcagcagcgagtgcatatcgctcatcaataaacccctaaaatgaaaaacactgcaaaaatggatctcgcgttaagaccccatatataaccgtttggtttaaaaaatataaaattatttatttttatttcagattattgccacgctcaataattacccctacgttcgccgcgcgcgcgacggcgccaggcttactcagtttgatgcgaacccacggagaattgaatcggctaagcagcagatccgccacctcttccgccacacgctcgaccagagcaaaacgcccgccttcaacatgatttatcaccgtgtcggcgatatccgcgtaacttagacaatctgcgacatcatcgcttttcgccgacttgcggttatcccatgccatttcgatatcgaacaccagtttttgctcgatagtctgttcccagtcgtaaacaccgatagtggtgattaccgaaagttgctctataaatacaatatccatcacgacctgcctgctttttggctaacccggataccacttccggcgaaatgtgcgtattatccacagaaatagtaaataaaacgacactttcaatacggaacagcttatgagtgcaatcgcgcctggaatgatcctcttcgcgtacctctgcggctcaatttccagtgccattctggtttgccgcatcgccgggctgcccgatccgcgagaaagcggctccggcaacccgggcgcgacgaacgtattacgaatcggtggcaagggagcggctgtcgcggtacttatttttgacatccttaaaggtatgttgcccgtctggggcgcgtatgcgttaggcgttacccctttctggctggggcttatcgctatcgccgcctgtctggggcatatctggccggtcttttttggctttaaaggtgggaaaggcgtagcaaccgcgtttggcgccatcgcgcccatcggctgggatttaaccggcgtcatggcaggcacctggctgctgacggtcctgttaagcggttattcatcgttaggggcgattgtcagcgccttgattgcgccgttttacgtctggtggtttaaaccgcagttcaccttcccggtatcgatgctgtcatgtctcattttgctgcgccatcatgacaacatccagcgtctgtggcgtcgccaggagacgaaaatctggacgaagctgaaaaagaaacgccagaaagattgagctggagctgcgtctggaagagggccgcaaccgtctggggatcggcccacaagggttgaccggcaatagctcggttgatgggcttacatatcgaatccgccgcgcgtcacccttccaccattggcgtggttaggcgcgattttcggcctgatcttcctggtgctgctgatcgtctccaggctgttgtggatgcccgtcgttttgctgtaaacccgttggggcggcatgatgtcgccccctttctccgcttttacgccgccggcagctcggccagcggccagcgcggacgtaccgttacgccaagatccgccgtaacgcccgccttaaaccgcaccattccggcataggcgatcatcgccccgttgtcggtacaaaactccggacgcgcatagaacacttcgccgcggcgtttttgcatcatttcggcaagcttcgcgcgcagcgtgcggttagcgctgacgccgcccgccatgaccagacgcttaaaaccggtgctttccagcgcgcgcttgcacttgatcatcagcgtatccacgaccgcatcttcaaaagcgcgcgcgatatcagcgcgagtttgttcgtcgccgccattactacgaatggtgttagcggcaaaggttttcagaccggaaaaactaaaatccagccccggacgatcggtcatcgggcgcggaaagacaaaacgccccgccgtcccctgcgacgccattttcgacagcatcgggccgccaggataatccagccccaacaatttggcggttttatcaaacgcttcaccggcggcatcgtcaatcgactctcccagcagttcgtactgaccgattccggtcacgctaatgagctgcgtatgtccgccggagaccagtagcgccacaaacgggaattccgggggattatcttccagcattggcgccagcagatgaccttccatatggtgtacaggaatggccggcacattccaggcaaatgccagtgaacgcccgacggttgcgccgaccagcagcgcgccgaccaggcccgggcctgcggtataggccaccgcgtcgatatcgctcgccgtcagaccggcttcttttaatgccgcctgaatcagcggcacggttttacgcacatgatcgcgggaagccagttcaggcactacgccgccgtagtcagcatgtaatttcacctgactatacaattggttggctaacagaccctttttgtcgtcgtaaatagcgatgccggtttcatcgcaggatgtttcaatacccagtacacgcatgacttgttttacctcgctctaataccgcgcagtgtaggtcgaatgcgggtggatgtataccctcagtcccgacttcgtgtatactccctccccttataaaagtccctttcaaaaaaggccgcggtgctttacaaagcagcagcaattgcagtaaaattccgcaccattttgaaataagctggcgttgatgccagcggcaaaccgaattaatcaaaggtgagaggcacatgccggtaattaaagtacgtgaaaacgagccgttcgacgtagctctgcgtcgcttcaagcgttcctgcgaaaaagcaggtgttctggcggaagttcgtcgtcgtgagttctatgaaaaaccgacgaccgaacgtaagcgcgctaaagcttctgcagtgaaacgtcacgcgaagaaactggctcgcgaaaacgcacgccgtactcgtctgtactaatcttttgagagcgggctgctctcaattcagatcgagttgtagttgtaaggccgtgcttccgaaaggaatgcgcggcttgttttcgtttatgcattagcatatacacaaaatcattcatgctgcgtccaggcggcaagagagtaaatccccggcgcttacgcaagtcagcgacaggggtgagcaaacgtagccaacactacggcagcctgaagaatgacgtgtataaaaggggcatatggctggacgaatcccacgcgtattcattaatgacctgctggcgagaaccgatatcgtcgatctgatcgacgtgcgcgtaaaactcaagaaacagggcaagaactatcacgcgtgttgtccattccataatgagaaaaccccttctttcaccgtaaacggtgaaaaacagttttatcactgctttggatgcggcgcgcatggcaatgcgatcgactttttgatgaattacgacaagctcgaatttgtcgaaaccgtcgaagaattagcggccatgcataacctggaaattccctatgaagcaggcaccgggcttagccagatagagcgccatcaacggcaaaacctctatcagttgatgaatggtctgaatgacttttatcagcagtcgcttacccatcctgcggcaaaacctgcgcgtgactatctgcaaaagcgcggtctgagcgctgaaattattcagcgtttcgccattggcttcgcgccgccagggtgggataacgcgttaaagcgcttcggtaataacagcgataacaaggcattgttgctggatgccgggatgctggtcaataacgagcagggcagcacttacgatcgtttccgtaatcgggtcatgttccctattcgggacaaacgcggcagggtgattggttttggcggtcgagtactggggaacgacacgccgaaataccttaactctccggaaacggacattttccataaaggccgccagctatatggtctttatgaggctcagcaatatagtgctgaaccgcaacgcttgcttgtggtcgaaggttatatggatgtcgtcgcactagcgcaatacgacattaactatgcggtcgcttcgctgggtacctcaaccacggcagaccatatgcatatgttattccgggcgacgaacaacgtaatttgctgttacgacggcgaccgggctggccgtgatgccgcctggagagcgctggaaacagcaatgccttatatgaccgacggtcggcaggtacgctttatgtttttacctgacggcgaagacccggatacgctggtgcgtaaagaaggcaaggcggcttttgaagcgcggatggagcaggcgcagccgctctctacgtttctgtttaatagcctcctgccgcaggtggatttaagctcgccggatggcagcacgcagttagccgcactggcgctgccgctcattaatcaggtgcctggcgacgcacaccgtattcagttgcgccagacgttggggctgaagttaggcattttcgatgatagtcagcttgatcgtttagtgccaaaacaggcggaaagcggcgtttcccgcccggctccgcagctaaaacgcacgaccatgcgtatactgataggattactggtgcaaaacccggatctcgcgccgttagtgccgcccttagacgcgctggatcagaataagctgcctggacttggcttatttaaagaattggtcaaaacttgtttggctcagccaggtcttactaccggacaacttctggaactctaccgtggcacaaatgatgctgcgacccttgaaaaattatcgatgtgggacgatatagcagataaggcgattgccgaaaagacctttaccgactcactcaaccatatgtttgattcgctgctgcaactgcgacaagaagagctgatcgctcgcgatcgcactcacggtttaagcagcgaagaacgccgagagctctggacgttaaaccaggagctggccagaaaatgaatttaacggcttaaatgccgcatatcgatcgggaagcccccgacagccgcagtgagaggcagcggccaaaatataagtatgccctcgctttaaatgtcgacagctataccgtcgacaccaatcaaacgaataagtgtggataccgtcttatggagcaaaacccgcagtcacagctgaaacttcttgtcacccgtggtaaggagcaaggctatctgacctatgctgaggtcaatgaccatctgccggaagatatcgtcgattcagatcaaattgaagatatcatccaaatgatcaacgacatgggtattcaggtaatggaagaagcgcctgatgccgatgatctgctgctggctgaaaataccaccagcaccgatgaagatgcggaagaagctgctgcacaagttctgtccagtgttgagtctgaaatcggtcgtacgactgacccggtacgcatgtatatgcgtgaaatgggcactgttgaactgttgacccgggaaggcgaaatcgacatcgctaaacgtatcgaagacgggatcaaccaggttcaatgctccgttgccgaatacccggaagccattacctatctgctggaacagtacgatcgcgttgaggctgaagaggctcgtttgtccgatcttatcaccggctttgtcgatccgaacgcggaagaagagatggcgccgaccgcaactcacgtcggttctgaactctcccaggaagacctggatgatgacgaagacgaagatgaagaagacggcgacgatgacgccgccgatgacgacaacagcattgaccctgaactggcacgcgaaaaattcgctgagctgcgcgcgcaatacgtcgttacgcgcgacaccatcaaagcgaaaggccgcagccatgctgccgcgcaggaagagattctgaagctgtctgaagtgttcaaacagttccgtctggtaccgaagcaattcgactatctggtcaacagtatgcgcgtgatgatggatcgcgtgcgtacccaggaacgtctgatcatgaagctctgcgtcgagcagtgcaaaatgccgaagaagaactttatcacgctgtttaccggtaatgaaaccagcgaaacctggttcaatgccgctatcgcgatgaacaaaccgtggtcggaaaaactgcacgatgtcgcggaagaagtgcaacgctgcctgcaaaaactgcggcagattgaagaagagaccggtctgaccatcgaacaggtgaaagacatcaaccgtcgcatgtccatcggggaagcgaaagcccgccgtgcgaagaaagagatggttgaagcgaacttgcgtctggttatttctatcgctaagaaatacaccaaccgtggcttgcaattccttgatctgattcaggaaggcaacatcggtctgatgaaagcggtagataagttcgaataccgtcgcggctacaaattctccacctatgcaacctggtggatccgtcaggcgatcacccgttctatcgccgatcaggcgcgcaccatccgtattccggtgcatatgattgagaccatcaacaagctcaaccgtatttctcgccagatgctgcaagagatgggccgcgagccaacgccggaagagctggctgaacggatgctgatgccggaagataaaattcgtaaggtgctaaagattgccaaagagccaatctccatggaaacgccgatcggcgacgatgaagattcgcatctgggtgatttcatcgaggataccaccctcgagctgccgctggactctgccactaccgagagcctgcgtgccgccactcacgacgttttggctggcctgaccgctcgtgaagcgaaagtgctgcgtatgcgtttcggtatcgatatgaacaccgaccacacgctggaagaagtgggtaaacagttcgatgttacccgcgaacgtatccgtcagatcgaagcgaaggcgctgcgtaaactgcgccacccgagccgttctgaagtgctgcgcagcttcctcgacgattaattcgccgcacacgtataaacgccgccgcaaggcggcgtttttttatcaggccatgcgcaagcgccctatttggcctgcagaatttctacacagcgcgagtattcgcgccctcattccccattgctatagcccacgcataatgagcgcttgatccagttcgcgataggcctcgaccagtttttccgttttaattcggtttaagccgctgggattcggcaacacccacaccatcgtcgcgccaatggcgatcttttgtttaccccaggcgataccgcgctggctgaacccctgttcaaaagcctgtttaccaagcaccgccagcgccgcgggctggtagtcctctattttttcaatcaggtttcgtccgccgctacgtaattcatgcaacttcacctcagtcgcttgtaccgtcggtcggtcgacgagtttcgttaccccgcagcgaaaatccagtaatttttccgcctcttccggtttcaactgtcgatcggtgaaaccggccaaatgaataactttccaaaaacgattcgcgggatgcgcaaacggaaagccggtattcgccgaggagagtcccggattgatgccgcaaaaaaccacccgtagccctggcgccagtatgtccttaaccattattactcctgagcaatacaacgttctttaagtataacgggttgaaaacacattgtttataaaaacagcacccgcacggttacggctggattacagcgtaaagttacattataatccaccgccacggccccttagctcagtggttagagcaggcgactcataatcgcttggtcgctggttcaagtccagcaggggccaccaaattttagctttaaaatcatataattaagccactctaaagagtggcctttttgtttctgacagggctcaccccataccgctatttacgatgccaataggctgccgcacgtaccaggtgtggatcaaaccccttttcaaagcactgacttaaacgttttaccgttttgccttcgccagtaatccagatgaaatagtctgattctggtattgtcagctgcgacaggcgcgtttgcattgcctgttcatcgccgccaacaacatattccacagtaatatccgtcaaatgggcgagataatcgcggtatgccgcatcctgaatgctcaccagcgcggttaccgcagggcgcacaggcagacggctaagcgattccagacgacgacgtagcgcaggcataccggactcatcgcagacataaacctgacaggcatactcttccggcaccaccagcgaaccgcgcggcccgccgatcgtcagtgtatcgccttcacgggcttccattgcccaacggctggctacgccgccatcgtggataaagaaatccagcgccagctcgcgacgcgcctcgtcatacagcggcgtgtaatccctggagaccgggcgaacgccctccccccagataatgccttcctcagtgactgtcggaggcgtaaagcgacagcctggctcagggaaaaaaactttcgtgtgatcgtcaaagcccagggagatgaaaccgtccagcgcctcgccgccaagtacgatccgctgaaatcctgcgctaatacgttctacccgcagaacgatcagctcgcgaaaacgcagctcattacgaacacgctgtgggtagcgtacggatgatgtcgtcattttttgccttcgtgaagtaatacgatatatctaaattaaagttttaaatgataatgattgttaatcagtaaaaatgcaactgttttttgatagtgttctggcaacacatcgctaatcacaacttcaaaataaaacgttataaattaatagattatatcaacaatcgcttttatccttgctaaaaaccatcatttagatataaattagatatatctaaataagcaggaggcaatgatgcaaaatcaacatgaagggtgttgcaaaaaccgggatcatatgcacgatggttgctgcaaagatcgagaacatcagcatgaaggctgccatagcgcgcatcagcatgagaacgccagttgcggcggcgagcaccgtcacggacacggctgtggtcgtcatggacagggcggtggtcgacgtcagcgattttttggccacggggaacttcggctggtcattcttgatatcctgacccgggacgccagccacggctatgaactgattaaagcgatagaaaacctgacggggggcggctatacgccaagcgctggtgtgatctaccctacgctggattttttacaggatcagcaatttatcacgattagcgacgaagaaggcgggcggaaaaaaatcgcgattaccgcgaacggcgcgcaatggcttgatgaaaatcgcgaacacctgacgcatattcaggcgcggctaaaagcccgttgtgtgggcatggagttacgtaaaaatccgcagatgaagcgggcgctggataacttcaaggccgtgctggatctgcggataaaccacagcgatatcaacgacgcgcaaatcaaacgcattatcggcgtgattgatcgcgcggcgctggaaatcgccgaactggattaagcgggctgcgtgtcctcttcgcggacgcggaacacgttaaccagctcttttaaatgtaacgcctgttcgttcagcgacgccgcggcggcaacagactcttccacaaggcaggagttttgttgcgtggcggcgtcaatcaggccaatcgcgctgttaatctgcgaaataccgtcagtttgctcacggctggcctgcccaatctcgcgtaatatcacatccatctcttcgacgttatccaccatgccattaatcagggcgctggctttctccaccaggtgcatcccttcctgagtctgactggttgaatcttcaatcaaattacggatttcactggctgacgaggcgctcttttgcgccaactggcgaacctctccggcgacaacggcaaaaccacgtccatgttcgcccgcacgcgccgcttcaaccgccgcgttcagcgccagaatattggtctgaaaggcaatggaatcaatgatattgatgatatccgacatacgatttgccgtatcgttaatgacgcgcattttctgcgtcacttgattcatcatctccccattgtttttcactacgctggcggcgccggcagagagtttggtcgcttcactggtatggtcagctgtgtttttaaccgtggcggtaatctgttccatcgacgccgccgtttcttcaaccgagctggcctgttcttccgtacgcgcggccaaatcctggttaccggcgacaatttgcgccgccgccgtggagatactctccgaaccgttttgcacttcctgtacgatatccagcagacgcgttttcatcgccattaatgcttgcagtagtacgcctgtttcatctttatagtcggtggtgatatggcgagtcagatcgccatcggcaatcgcctcggcaaagcgtaccgcttcatcaagcggtcgggtaatggaacgtacgatataccatcccattacgcatccggcagcgatgcttatcagcgccagggtaattaacagcgtccggttagttttaaaatctccttcgacctgcacgcccgcgttgtgcatctgcgcatcctgaacggcgataagttcctgaactttgtccttatagaccttttgcacttgcaccgttctggtcatcatctcctgaatggccgcctgacgattatggctttgaatatcttgcaaaatacggaatctggactccaggtattgctggcgcgcttcacggatctcggtaatgattttctgcgaagccgcatcgtgacgattgctggaaagctcatccagtaacgccgtaatacgctggcttatttcatccagctctttctgcgaactctggctccagcgcccctcttcatccagtaacatgagctgctgcgcgatgatgaaatcattaaaattatcgattaacagattggctttcaccgtggtgggataatcattggtaataatgttctgcatacccgtattagcccgatcaaggctaaacaaagacagagcggaactcaccaccatgagaacaatgaataagccaaaggccataaataattttgaacgtattttaatgttatgcaaaaacatattttctccctgggattgcatatcctcatacaggaagatttatcggcaataatgttactaactttatgatattgatcgctttttatttcggaacattattagtaagtaatatttattgttcacagaaagatgaaccaaaagtgacataaattggcactaataatgaaagaaatacgctaaaaggttaaccatttcttatttattaactgagtttatacctattaataggtagacaagggagaaggaataaatatcacattatttttaacatcacaggccactgatactctctatgatggcaggcaccgccttctatcagagcgcatccgcccggtaagcctgttgctaccgggcggatgtcattaccattgctacctacaaataaacttaatgcagtaccgtgaccgcatcctccagccggctggcacggtgttttaccattgcggagacttgtgcgctctcttccaccagcgccgcatttttctgggttatgcggttcaactcgtccacggcgcgggtcaggctggaaagcccatctgtctgttcctgcgtcgactgactgatacgtgcgataagcagggtgacattttgcacctgagctacaatgtcatccatggtacggcctgcggcgtgaacctgctcggagcctgactgcacctttgttgcgctggcatcaattaatttacgaatatcgttcgccgcattagcgctgcggctggcaagatggcgtacctcgccagcaaccacggcaaaccctttcccctgctcgcccgctctcgccgcttctaccgccgcattcagcgccaggatattcgtctgaaaagcgatatcgttaattagcgtggtgatcgtcccgatacgttgcgtactgtgagcgatatcatccatcgttttaatcaccgtatccatcgcctcacctccctgagtcgccgcgctactggccgccatggaaagcttatccgcagcggaagccgtctcggaattgagcttcacggactccgccatctggttcatggtcgttaccgtttcctgaacattctccacggtctgacgggtgtgttcgttcagatcattattacccttcgccagcctttcactgccgtttctgacgctggaaacctgacttgatacgtcattgatcagccagcggcacatcaagccaagctgccccacggccctcagcgtcagccccaactcatcgctacgattaagatgttgtacgctgttgcgttcgccggtcgccactttcagcgcctgcgtcgccacattttcaatgggacgcacaatttgccattccaatagcgccgtacctgccagcatcgccaacgcgcccaacagcaacgcctgccatgaggcatccgtaccgaacaacgccaacgccagcattacggccattagccccataatgctacgcactcgccagcgaacaggcatagcgggcagtttgcccagcaaaccctgacgaaccaccaggcctttatgaattcgtttactacaccgcccttcatttagcgcctgatataaaggctcgacggcggcaacctcatcatccgtggcgcgggtacggatcgacatatatccagtcacacgcccttcacgtatcatcggtaccgcgttggcccgcacccaataatggtcgccgtttttacgccggtttttcacaatgccgctccacggttcgccctgttttagggtgtaccacatatctgcgaaggcagctttcggcatatccggatgacgcaccagattatgtggctgcgccagtaactcgtttaactgatagccgctcacttggacaaaagtgtcattggcgtgagtgatatagctttccaggtcggtcgtagacatcagagtggtatcatcatccagcggggtatttagctggctgacgtagggatgagaagacatgatagcgtcctgtgcaggttatctggatgttaatttttcgctcagatgttatttcggcgctaatctatttatctttagttgttaaaattgctctggatcgcaatttgcgattaatccttaatatttgtacgattttcacctcatcctgcgccttattttcattatgaaattgtttagcgtggacaacctttttctttaaaatctgccctggctcacctttttctcacgccgccgctaacgcaacacaccgtaaaccgtaaaacaagatctgctcaaaatgcatccaattgttaacgcatgatattaaatgttgggtaaatgtgattattcctggtgtttatcccgattttcactatgggcttagacccccgctaatccctgcaatacttaattcagtatcatgtgatacacggccctctggagctcattttgaacaggttaccttccagcgcatcggctttggcctgtagcgcgcacgcactgaatctcatcgagaagcgaacgctaaaccatgaggaaatgaaagcactaaaccgagaggtcattgactactttaaagagcatgtaaatccaggatttctggaataccggaaatctgttaccgccggcggggattacggagccgtagagtggcaagcgggcagtttgaatacgcttgtcgacacccaggggcaggagtttatcgactgtcttggggggtttggcatctttaacgtggggcaccgtaatcctgttgtggtatccgccgtccagaatcaactcgcaaaacaacctctccacagccaggagttacttgatcccttgcgggcgatgctggcaaaaacgctggcggcgctgacaccggggaaactcaagtacagctttttctgtaacagcggcaccgaatccgtcgaagcggcgctaaaactggcaaaagcgtatcagtcgccgcgcggcaagtttacctttatcgccaccagcggcgcatttcatggcaaatcattgggcgcgctctccgccacggccaaatccaccttccgcagaccctttatgcctttactgccgggcttccgccatgtgccgtttggcaatatcgacgcgatgagcatggcatttagcgaaggcaaaaaaacgggcgacgagatagcagccgtgattctggagcctattcagggtgaaggcggcgtgatcctgccgccgcagggatacctgacagaggtacgtaagctctgtgatgaattcggcgctctgatgattctggatgaagtacaaaccggcatggggcgtaccggcaagatgtttgcctgcgagcacgaaaatgtgcagcctgatattctgtgtctggcgaaagccctgggcggcggcgtgatgccgattggcgccaccatcgcgactgaggaggtgttttcggttctgttcgacaatcccttcctgcataccaccacttttggcggtaatccgctggcttgtgctgccgcgctggcgaccattaacgtcctgctggagcaaaatctcccggcccaggcggaacaaaaaggcgatacgctcctggatggttttcgacaacttgcgcgtgaatatcccaatctggtacacgatgcgcgcggcaaaggtatgttgatggccattgaatttgtcgacaacgaaacgggctaccgttttgccagtgagatgttccgtcaacgcgtgctggtcgctggtacgctgaataatgcgaaaacaattcgtatcgagccaccgctcacgctaaccattgaactgtgcgaacaggtattgaaatcagcgcgtaatgcgctggcggcaatgcaggtgagcgttgaagaggtttaaaaacgatgccggatggcgctgtgcttatccggcctgttttccccgggtcgcggcctcttttttgaatcccatcacaatcaccacattccccttttcccttttacctcgcgacggctacagtagtaactcatccgaccacataacaataattttacatactggatacgcttatgagctacccgtcgctgttcgccccgctcgatctgggctttactactctcagaaaccgtgtgctgatgggatcgatgcacacgggtctggaggaacatcctgatggcgctgagcgcctggcggcattttatgccgagcgcgcgcgacacggcgtagcgttaatcgtcaccggcggtattgcgcccgttccctccggggtcgtgatgaccggcggcgcgatgctgaacgatgccagccagttaacgcctcaccgcgtggtgaccgatgccgtacatgcgcaaggcggtaaaatcgcgctgcaaattctgcacaccgggcgttacagctatcagccgcacctggtcgcgccgtcggcaattcaggcgccaatcaaccgctttatgccgcatgaactgacgcatgatgaaatcttgcagttaatcgacgacttcgcgcattgcgcgcaactggcgcgggaagcaggctacgacggcgtagaggtgatgggatcagagggctatctgattaatgaatttctcacgcggcgaactaaccatcgcgatgacgaatggggcggcgactatgccagccgtatgcgcttcgcggttgaggtagtacgcgcggtacgccagcgggtagggaacgactttattattatctatcgcctgtcgatgctcgatctggtggaaaatggcggcacgttcgacgaaacggtacaactggcgcaagccattgaagccgcaggcgcaagcctaattaataccggcattggctggcatgaggcgcgaatcccgaccatcgccacgccagtaccgcgtggcgcctttagctgggtgacgcggaaactcaaaggtcatgtgtcggttccgctgatcgcgaccaatcgcattaacgatccgcaggtcgccgagacgatcctgacgcgcggcgatgccgatatggtgtcgatggcgcgtcccttccttgccgatgccgaattcctgactaaagcgcaatccggacgcgcagatgagatcaacacctgtatcggctgtaatcaggcctgtctggatcggatcttcatcggcaaagtgacctcctgtctggtgaacccgcgcgcctgtcacgaaacccacatgccgataacgccggccatacgcaaaaagaacctggccgttgtcggcgcaggcccggcggggctggctttcgcgattaacgccgcgtcgcgcggccatcatgtcacgctgtttgacgctcagagtgaaattggcggtcagtttactatcgccaggcagatcccgggtaaagaggagttttacgaaacgctgcgctactaccgtcgaatgatcgatgttactggcgttacgctgaaactgaaccaacgggtgaacgcagaggatcttcagccgtttgacgaagcgatcctcgcttgtggaatagtaccgcgccgcccgccgatagacggtatcgatcatccaaaagcattgacctacctggaggtattgcgcgataaggcgccggttggtaagcgagtggcgatcatcggctgcggcgggatcggttttgacacggccatgtatctgagccagcacggcgaatccaccagccaaaatattgctgaattttgtacggaatggggaattgataccagcctgcaacaggcaggcggtctgcgcccggaaggcccgcgcctggcacgtagtccacggcaaatcgtcatgctgcaacgcaaaaccagcaagccgggcgaagggttaggtaaaaccaccggctggatccatcgcgcgacgttactggcgcgcggcgtgaagatgatcccggcggtcagttaccagaagatcgacgacgacggattacatctcttgatcggcggcgaaccgcagttgctggaagtggatcatgtggtgatctgcgccggacaggaacctcgccgcgagctggcggacccgttacgcgccgcaggtaaaacggtacatcttatcggcggatgcgatgtcgcgatggagctggatgcccgacgggcgattgcccagggcacccgactggcactggagatttaacgactttgcctgatggcgctacgcttatcgggcttacgccgtcataccggttttataggccggtatgacgcttgagcgccttatcgacggcgtccctgcttcaccgctttcaaaatgacaaatttattgttggttgctatcgtcgcgcaattaccgaaaatcttcttcagcttgtggaaatagtccagatggcggttcgccacaatatacagttcgccgttgattttcaggcagcggcgggcgtgatggaacatctcccaggcgatattgtccgtcagcgcatgtttctggtggaacggcggattgcagaacaccgcgttaaaacggaacggctccacgccggagagcgcgttgttgatcataaattcgcagcgttcgaatgcttccggcaggttcgtttctacattcaaacggctggaatctaccgccatcggcgattcatcgacaaatactacgttcgcctgcggatttttcgccagtaagctcaggccaatcaccccattgccgcagccgagatcgacaatctccccgtcgaggttttccggcaaatgctgcataaagaagcgcgcgccgatatccaatccggtacgagaaaacacattcgcgtggttgtgaatcgtccagcctgtatcttccagtttccagcttagcgtttgcggcgcgtcggccagttgcggatgactgaaggtacagttaatcaggcgcgctttcttccacgccagcgtcgtcgtggttgggcccagcactttttcaaacagttccagcgtagaggtatgaatatcacgcgctttcgcgccggcgataatacgcgtttgcgccgtaacgaccttacgcaaagcgcgtaactgctgttccagcaacgccagcgttttcggtaccttaatcaataccacgcccggcgcctgcgggtagtcagcggtactgtcgagaaacgttacgctggactccgcgatgccgttatggcgtaaattctctcgcgtacccagttcgcttaaatacgaatcgccaatactgtatggcgaatgctccgccagcgcacagcttagcgcgccaaacgtatcattcaggatcagcaccgggccgcgaatttccgtctcatccaactgttgcagcagatactcatcggccgcctcccacgccagaagcgggttaacatcatccgtttgcggaaaacgtttcagcgtcagtgaacggaaaccgtcgtctacgtggctcattaggcctcctgaatggtaaaattgcggcgttatccctgaaaagggtgcgtgagtatacactttttatcagcaacatggagctttgatgacctcactaacttaccttcaggggtatccggaacatctccttgcccaggtgcgcgccttaatcgccgagcagcgcctgggagcagtgctggaaaaacgttatcccggcgcgcatgattacgccactgacaaagcgctatatcactatactcaggaactgaaaagtcagtttctgcgcaatgcgccgcccattaataaagtgatgtatgacagcaagatccatgtgctgaaaaatgcgctgggactgcataccgctgtctcgcgcgttcagggcggcaagctcaaggcaaaggcggagatccgcgtcgccaccgtgtttcgtaacgccccggagccattcttacggatgattgtggttcacgagctggcgcacctgaaagagaaagatcataacaaagcgttttatcagctctgctgccatatggagccgcagtaccatcaactggagtttgatacgcgactgtggctgacgcatcaggcgctgtcggcacaataaattctgaaaatgccccttcccccgtatctttttaacggcgtgggcataaaatcggcgcgttcacatttcgctcattgcctgccgccacgtcaaggatgacgatctgtagagggtattttttatccaccgccaacggaaccgcgcaacgaccatgctctcacaatgtgcccgttttatccgccgcctctgttttacacgccgggccttaacagtggcgtgttttctgcttgtcgcagcaggcgtcgcgcttttctattccaactggcttatcgtcaacgcctcacagcatctgacatggaatgacattcagaccgttcccgcccgcaacgtcgggctggtgttaggcgccaaacccggcaatcggtattttacccggcggattaatactgccgccgcgttgtatcacgccggtaaagtgaagtggctgttagtcagcggcgataatggcaaaaaagagtacgatgaaccttcggcgatgcagcaggcgctgatggcgaaaggtgtgccggaggcggccattttttgtgattatgccggattctccacgctggactccgtggttcgcgcccggaaagtgtttggcgaaagccgcattacgattatctcgcaagcatttcataatcaacgggcgatctggctggcgcaacaatatggcattgacgctatcggcgttaacgcgccggatctgaataaaaggcacggaacctacacacgacttcgggaaaagctggcgcgggttagcgcagtgctggatgccaaaattttgcatcgtcagcctaaatatctgggcgctggcgtcactattggggctgatagcgcacacgggtgcccttctcgccagtaaaatgccagagtgcgtcgcagcgcactggcaagggcggaaaggcgtgctacattgacgaaaaatccctttctggagtccgctgacgtttatgatacgtttcgctgtaattgggactaactggatcacgcgccagtttgtcgacgccgcccatgaaaccggcaaattcaggctcgccgccgtttactcccgtagtcttgaacaggcgcagtctttcgcaaatgattatcccgtcgagcatctgtttacctcgctggaagcgatggcgcaaagcgacgcgattgaggcggtttatatcgccagcccgaattccctgcatttctcccagacgcagcgctttttgcagcataaaaaacatgtcatgtgcgaaaagccgctggcttctaacctggcggaggttgatgccgctatcgcctgcgcgcgcgataatcagcgggtactgtttgaagcctttaaaaccgcctgcctgcccaatttcctgctgctgcgggaatcgttgccgaaaatcggcagaatgcataaagcattactaaattactgccagtactcttcacgttatcagcgctatctgaacggtgaaaatccgaatacgtttaatccggccttctccaatggttcgattatggatatcgggtattactgtctggcgtcggcgatcgcgctatggggcgagccgcgcagcgttcaggcgtcggcgaatttattggaaagcggagtagatgcgcacggcgtcgtggttatggattacggcgattttagcgtcacgctacagcattccaaagtcagcgactcggtactggccagtgaaattcagggcgagaggggatcgctggtcattgaaaagctgtcggaatgccagaaagtgtgttttgcgccgcgcggcgcgctgatgcaggatctgacccagcctcagcatattaataccatgctgtatgaagccggggcgtttgcccagcttattgaaaaccacgccgtggaacatccggggttgtcgctaagtcgcgccacggcaaaatggctgacagaaatacgccgtcaaaccggggtcatcttcccggcggacgatctgacccatccccttactgcgtaaaattatgtaaatcatatgttacaggtcattgactctacgcgtggcctgtcatactttgttacgcgcaaaggggagtaacttcattgccggtcgatcgtcattacgatgtgtgcaaaaccacatccggtcaccgggcagccataaaggaatgcgtcagcgtattcctttattgttgtaagtgagaccttgccgaatggcaaggtctatgcataaaagcaacggctaatgccattcggcgttagccgttttttttttttgcatagggagaaataatgaatactgttggtacgccattattatggggtggattcgcggttgttgtggtgataatgctatccatcgacctgttgttgcagggacgccgtggcgcacatgcgatgtcgatgaaacaagcggcaggatggtcaatcctgtgggtaacgctctcgctactgtttaacgccgctttctggtggtatctggctgaaacgcaagggcgcgaagttgctgacccgcaggcattggcgttccttaccggctatctgattgagaagtcgctggccgtagataacgtctttgtctggctgatgctgtttagctatttctccgtccctccggctctgcaacgccgggtgctggtgtatggggttcttggcgcgatcgtgttgcgtactatcatgattttcgccggtacctggcttatcactcagttcgaatggctgctgtatgtgttcggcgccttcctgctgtttaccggcgtaaaaatggcgctggcgaaggaagatgaatccggcattggcgaaaaaccgatggtgcgttggctgcgcgggcatctgcgcatgaccgatacgatcgagaacgagcactttttcgtacgtaaaaacggcctgctgtatgccacgccgctgctgctggtgctgattatggttgagttcagcgatgtgatcttcgccgttgacagtattccggcgatctttgcggtcaccaccgacccgttcatcgtactgacctctaacctgtttgccatcttaggactgcgcgcgatgtacttcctgctgtccggcgtggcggaacgcttctcgatgctgaaatatggtctggcggtcattctggtctttatcggcattaagatgctgatcgtcgacttctaccatattcctatcgcgatttcgctgggcgtagtgtttggtattctgaccattacgctggtgattaacgcctgggttaaccatcagcgcgataagaaactacgagcgcaataatcttttatcggggtaaacctgccccgtcaaaaacgcccgacagcgcacacctgtcgggcgtttttgtttaacatgtcacaatactgttaatataaagttataaaacatgatcacagcaaaaaatccaggatatttcgcttcccgaaccttcaactttccttatactcaaccaggcaaacactttgttacatcctgaaagatgcgccgtaagagcgtgcaggggatgaccagcaacacaatacaaggaatatgaaatggctacgcaacgagcatcagggctactgcagcgtttagcgcaaggcagtctggttaaacaaattttagtgggtctggtactggggattttactggcatggatttctaagcctgcggcagaagcggttggcttgcttggcaccctgttcgtcggcgccttaaaagcggtcgcccccgttctggtgctgatgctggtaatggcctcgatcgccaaccaccagcacggccaaaaaaccaatattcgccctattctctttctttacctgctaggcaccttttcagccgcgctggcggccgttgtgttcagcttcgccttcccttcaacgctgcatctgtccagtagcgcccaggatatcgtgccgccgtccggcattgtagaagtcttgcgcggtctgctgatgagcatggtgtcgaaccccatcgacgcgctgctgaacgctaactatatcgggattctggtatgggccgtcggtctgggatttgccctgcgtcatggtaatgaaaccaccaaaaacctcgtgaacgatatgtctaacgccgtgacctttatggtgaaactggtgatccgtttcgcgccagtcggtatttttggtctggtttcatcaacgcttgcaaccaccggcttctccaccctgtggggctatgcgcacctgctggtcgtcttgattggctgtatgctgctggtcgcgctggtggtcaacccgctgttggtattctggaaaattcgtcgcaacccttatccgctggtgttcgcctgcctgcgtgaaagcggcgtttatgccttctttacccgcagctctgccgccaatattccagtgaatatggcgctgtgcgaaaagctgaatctggacagggatacttactccgtttccattccgctgggcgccactatcaatatggccggcgcggcaattaccattacggttctgacgttggcggcagtccatacgttaggcgtcccggtggatctgcctacagcgctgctgctgagcgtggtggcctcgctgtgtgcttgcggcgcctccggcgtggcaggcggttcattgctgctgatcccgctggcgtgcaacatgtttggcatcccgaacgatatcgcgatgcaggtagtagcggtcggctttattatcggcgtattgcaggattcgtgtgaaacggcgctgaactcgtctaccgatgttctgttcactgcggcagcctgccaggcagaggacgaacgtctggcgaataacgccttgcgtagctaagtgattatcgatgccggatggcgtatgccatccggcgtaacgatagatctgaatctcccaatccataggctgtgatggaaagcgaattgatgttcacgcgcaacatcctcgcgtaacgttatatgtagatggcgtctgccgcggcgctcggtcagcgtaaagtataaagtgtcagcctgtgtaaatcctctcgccaccctcccttgcgataagcaaaatcaaagctcaacgacgcgtaatttctataacggacttcgttgacctttgttacaattagatgcattttgaatttttgtgtgttagtgcttgcttacttcacaacttaacaaggaatagttcaggccgcgaatttgccgtttccgcaacgctgataaaaactccaactctgttgcggcagtgcaaacctcagatcaccggcgtgacgttaaccgattctccaggaatactgaatggaactactgactcaattgctgaatgccctgtgggctcaggactttgaaacactggccaatccttccatgattggcatgttatattttgtgttatttatgattttgtttctggaaaatgggctgctccctgccgcctttttgcctggcgacagcctgttgatcctggtcggcgtgctgatcgccaaaggcgcgatgggttatccacaaaccattttgctgcttaccgtcgcggccagcctgggttgctgggtcagctatattcagggccgctggctggggaatacccgcaccgtgcaaaactggctctctcatctccccgcacattatcatcaacgcgcccatcaccttttccataaacacggcctgtcggcactattgataggccgttttatcgcgtttgtcagaacgctgctgcccaccattgccggcatatccggtctgaataacgcgcgctttcagttcttcaactggatgagcggcttgttgtgggtgcttatcctgacgtcgctgggctatctgctgggcaaaacgcccgtctttatgaagtatgaagatcagttaatgtcatgcctgatgctgctgcccgtggtgctgctcttttttggcctggcgggttcactggtcatgctgtggaaaaagaagtatgggagccggggataacttatgcttaaaccacgcataactgcccgacaactcatttggatcagcgcttttctactgatgctgaccatactcatgatgacgtggtcaacgctgcgtcagcaagagtcgacgctggccattcgcgcggttaaccagggcgccagtatgccagacggcttctcagttctgcatcatctggatgcgaacggcattcattttaaaagcattacgcctaaaaatgacatgttgctcattaccttcgattcccctgcgcaaagcgccgcagcaaaaacagtgcttgatcaaacgttaccacacggttatgtcgtcgctcagcaggacgatgacaacgaaacggtacagtggctgtcccgcttacgggaaagctcacaccgctttggctaatctccaggaatccgaatcatatcactcactttggtgatttcattgtttaatgactatgattaataaagcggtgtttaacccaccgcgttattatcgggatcaccgccccggacaacgggtccgaacataagggaaagttcaggaatgaaataccgcatcgctttggctatcacgctttttacacttagcgccggtagctacgctaattcgctttgtcaggaaaaagagcaggatatacaaaaggaaattagctacgctgaaaagcacaacaatcagcgccgtattgagggtctgaacaaggcgctcagcgaagtacgcgccaattgtactgacagcaagctgcgcgccgagcatcagaaaaagatcgctgagcaaaaagaagaggtagccgaacgccaacgtgatttagccgaggcaaaagcaaaaggcgatgcggataaaatagacaaacgtgaacgtaagctggccgaggctcaggatgagctaaaaaaacttgaggccagagactactaaattaacgccgaatgtaaatactcactcacctggagaaaactatgtcgaaagataacactacggaacatctgcgcgctgagttgaaatccctgaccgatacgcttgaagaagtgctgagctcttcgggcgaaaagtcgaaagaagagttgagtaagattcgtagcaaagccgagcgcgcgctgaaagagagccgttaccgcctgggcgaaacgggtgatgtgattgccaaacagactcgcgtcgccgccgcccgcgccgatgattatgtgcgcgaaaatccctggacaggcgtaggcattggcgccgctgtcggtctggtgttgggcgtactgctgacgcgtcgttaattatggcggactctcgacaggcacaaggaccaggcaaaagcgtactgggtatcgggcagcggattgtcaccattatcgttgagatggtggaaacccggctgcgactggcggtagtagaactggaagaagagaaagcgaacctctttcagcttttgctgatggtaggtcttaccatgctcttcgcggcgtttggcttaatgagcctgatggttctggtcatctgggctatcgatcctcagtaccgtttgaacgcgatgatcgctaccacagttgtgctgttagtgcttgcgctaatcggcggcatctggactttgcgcaaagcgcgtcagtccacgctattgcgccatacgcggcacgaactggctaacgatcggcaaattctggaggacgatcagtcgtgagcagcaaaggcgaacgcgaaaaacgtaaagcgctgcttctcagtcagatccagcagcaacggctggatctgtccgccagccgtcgcgactggctggagaccaccggcgcgtacgatcgcggctggaatacggtgttaagcctgcgctcctgggcgctggtcggtagcagcgtaatggccatctggaccatccgtcatcctaatatgttggtacgctgggcgaaacgcggcctgggtatctggagcgcctggcgcctggtaaaaactaccctccgtcaacaacagctccgcggttaatatcttttcttttatagcatcgcgccatcaggttatcacctggtggcgcgatacttttatgcatatcgtctctttagcaatcactcaaattttttgaaaaaatttggcaattttccttgctaacaattcctgcacgccacgtttatgattctctccagcgataacaatgatgcgccaaaccgcgtcattgctcatgaaaatagcagcagccgccgaatcggccccctggagaataaaatgaaaaaattagaagatgttggtgtactgatagcgcgtattttaatgccagttctgtttattaccgcaggatggggaaaaattagcggctatgcgggcacacagcagtatatggaagcgatgggcgtaccaggattcctgctgccgctcaccatactgcttgagttcggcggcggtctggcgattctgctggggttcctcacccgcaccactgcgcttttcaccgctggttttacgttgctgacggcattgatcttccatagcaattttgcagaaggtgtaaactcgctgatgtttatgaaaaacctgaccattgccggcggattcttattactggcgttaaccgggcctggcgcgttcagccttgaccgtctgctgaataaaaagtggtaagcaatctatactcaattaaaaaagcgagggaatagcgcctcgcttttgtcatctgaaggagagagacatgggacaactgatcgatggcgtctggcacgatacctggtatgacaccaaatcttccggggggaaatttcagcgttcagcgtcggctttccgcaactggcttaccgctgacggcgcgcccggaccttccggcgaaggcggattcgccgcagaaaaagatcgttaccatctgtacgtttcccttgcctgcccctgggcgcatcgcacgctcattttccgtaaactgaaaggtctggagccgtttattccggtttccgtcgtgaatccattgatgctggaaaacggctggacgtttgatgatacttttccggcggccaccggcgataccctctatcagcatgaatttctctaccagttgtatctgcacgccgatccacactacagcggccgcgtcaccgtaccggtcttatgggataaaaaaaatcatactatcgtcagcaacgagtccgccgaaatcattcgtatgtttaactccgccttcgatgggctgggcgctaaagccggggattactatccccccgcgctgcaaagcaaaattgacgagttaaacggctggatttatgacaacgttaataacggcgtttataaagcaggcttcgccaccagccagcaagcgtatgatgaagcggtagacaaggtatttactgcgctggcgcgcctggaacagattctcggacagcaccgctatctgacgggcgaccagttgaccgaggcggatatccgcttatggacgaccctggtacgctttgatccggtttacgtgactcatttcaaatgcgacaaataccgaatcagcgactacctgaatctgtacggtttcctgcgcgatatctatcaaatatcgggcattgctgaaactgttaatatggaccatattcgtcaccactatttccgtagccataaaacgattaaccccacgggtatcatttctgtcggaccgtggcaggatctgctcgaacctcacgggcgcgacgtgcgctttggctaatttcaggcgtcctccgggacgccttattaataaataccacaaatatttaccagcatttcattcgcggctattcttagtttgattactttaaaaacaagtgattgaaccattattgaggcgaaaatggattggtatttaaaggttttaaaaaattatctgggatttggcggccgcgcgcgacgcaaagagtactggatgtttattctggtcaatatcatctttacctttgtgttgggcctgctggacgccatgcttggctggcaacgcgccgggggtgaaggcgttctgaccaccatttacggcgttctgatctttttaccgtggtgggccgtgcagttccgtcgtctgcatgacactgaccgctccgcatggtggctactgttgctacttatccccattatcggctggcttatcatcatcgcgttcaactgccagaatggtacgccgggcgacaaccgcttcggccccgatccgaaacgtttttcctgatggcggcgcggcgccgcttttaaagcgccgcgcgctatttattttccggcgaatagcttaggtatttcccgcaggcaccaggcttttgcctcccccatactgtcgcgccgccaggccataataatatcgatttcgctggtcgattccgggctgaccacgcgtagccgcccttcggcaatatcctgttccaccatcgaatatggcatggtcgcgacgccaagcccggccagcagcgcctgacgtttatcttcaatcgtgcttaccgtcagacgtggctgcttatccagcagttgcaccgttaataccggccgctcgcgcgcggtatccgctaccgctacgccgcggtatttaacccgcgtcacttccgaaagcggctccggctcctgatgaatagggtggtcaggcgcggcgacatacacattcattaacgtatacaacttacgggagttaatttccgacgacgatcgaaaatgcatatccggagcgataacgatatccgcccgtccctgctcaagccgctcccatgcgccagccagtacttcggtaatcaatgaaagctgcgtattggctttagcggccagccggtcgatcagtggaaaaaaagcaggcgtcggtaccagagcttcagtgactagcgtcagatgcgtttcccaaccgcgggccaacgcttcagcatccgtcgttaacttgtctgccgcttccagcaatacccgcccgcgttccagcagcatacgtccgacgttggtgaattttgtacgatggccggagcgatcgaacagtacaacgtccaactcttcttccagcttctgcatggtgtaactcagcgcggagggcacacgccccaactcatcagccgctgcggcaaaactgccccggcggtcaatggcgtccatcacacgcaatgcttcaagcgtcagcgctctctctttagccataacgttctcattcaggaaatttgaacataccgggcagaatatctggctaacaatgcagcgtccagccccttaacataaaaggaagtaaagagaggttaataacgatgattacgacccgaaccgccaaacaatgtggacaggcagactacggatggctacaggcccgctataccttctcctttggacactatttcgaccctacactgctaggctacgcgtcgttgcgcgtactgaaccaggaagtgctggcgccgggcgcctcttttcagcctcgaacttacccaaaggtggatattttaaacctgattctggacggcgaagcggaataccgcgacagcgacggcaaccatgtacaggctaaagcgggcgaagcgttactgctcgccgcgcagccgggcattagctacagcgaacataatatcagcaaagttaagccgttaacccgaatgcaactgtggcttgacgcctgtcctgaacgggaaaacacgctggtacaaaaaatcccactcctggcggcgcaacaacagcttcttgcctcgcccgacggtgagcaaaacagcttacaactgcgccaacaggtctgggtacatcatattacgctggagaaaggcgaatcgcttaatttccagcttcacgggccgcgcgcctatttgcagtcgattcacggtacgttccacgcgatgacgcacaacgaagaacgcgaggcgttaacctgcggagatggcgcatttattcgtgatgaacctaacattacgctggttgccgatacgccgctgcgcgcattactggtagatttaccggtgtagccagccagaaaaggagtcgcaagatgagcaaaaaatcggcgaagaaacgtcagcccgtggtaaaacctgccgtacaggaggcgatgagcgccgctgtgccgctgggctatgaagagatgctaaccgaactggaagccatcgtggcggacgccgaagcccggctggcagaagaagaggccgcagcctgaaatcatgccggatggcggcgcaagcgcccgatccggctgataacgggtagacccgataagcgcagcgccatcgggcaacacgctgccccgacgtcatgccggggcgttattattaatgcgctttactggccataatctcgatgatctgcttgtcggtctgctgcattgagcgacacgccagcgaacacaaattcgaaatagattgttcgacattgtgcgccacaatcccttcgtttccggtcaccgccgtatcatccaacgccatcagtacggctttccacgccgccgacgcgctggtagagactttcatcgcgcagctattcgacgcgccatcgcaaatcatcccgctgacatcaccaatcatactgctgatagccattgcgatagtgtcgtaacgaccatctatcagccacgccatacccgctgccgcgcccatcgccgccgtagttgccgcgcacagcgccgacaaacgcggaagctgatggtgaatatagatagcgctcaaatgcgataacattagcgcgcgcgccaggcgctcgtcatcggcgccgacatgttcagcaaccaccatgactggcaccgtggcggtaatcccctggttgccggagccggagttgctcatcgcgggcaacgtggcaccgcccattctggcgtctgacgccgcgctggtacggatcaaaatcgccgtggagagatctttcgccagcagaccgcgatcgcactgtttggccagcgtcgaaccgatatgcagcccccaggaaccacgcagtccctcctgcgacaacgcgccgtttagcctggccgcatcgagaataaagcggatagcgtcaaagggcaccgcattcacaaacgccaggatctcttccagcgaggtatgagacagcactcccagtggcgaggttttttcttcttcctgcgcattatcggcctgggtaaataccacacccttgtcggtttctatccgcacaatatttgtatgatcgccgacgatcgtgacacatgcccagctatcgccgctatacactttcgcccgtgaaaacagaatatcgttacatggctcctgcaacatcaccgcgacatgtccagcggccagcatcgcttttgcatcggcaacggctttagcggaagcgtcttttaacacctccaacccggctttcgcatcaccgcccaacgcgcccaacgccgcggcgatcggtagccctaccattcccgttcctggaacggtaacgcccataccatttttcatcagattgggcgaaacccacgcgtcaatgcgttcaactgtgccgttaagttcagccgccgccgccgctgccgccagcgccagtgaaattggctcagtacaccccagcgccggttttacttcttcctgtacggccagaataaaactttgccacaatggatttattttagattcaaacataacaacaaccttaatctcaggtatatcaagagaatgccaggaacggagaaacgcatagcagcagaccggtaataataatcaggtacaacgaagcgcctttatatttgtgcaatgcgggaaccttgtagaccaaccatgccggaattaaacagcccaccataccgaagatagggctacaaatagaggtgaagctcagtaccggcgcgttgagcacaatggcgctccaggccagcaaaatagcgaaaatcataatgccgcgctgtaccagattttccttaatcttctcggcgggcattttacggcgcaggatattcatcacaatgccttgcgtcgcttcgcggaatcctaaataaacgccaaagaaggcggtcatgacggcaaagatgttcagaattacgctaaccactttgacccagccagcgccatcgccgctaataaattgcgcggcgatcgccagggcggaaatattctgctcgtaggctttcaccgcttcgtcatgccccatcgccagggtgaaggaaaccgcatagaaaaatacggtaacgaacaggatgccaaacgcaatattcatggcacgcagcgctttatggcgtgcgacctcaatagatttttcgcgtgaacggtaagagatcaccattgggcttaacgtctggataaataaaatcgaggtcagcgtaaatggcagggtaataatggcgtttttaatcagcagggccatcggcggcagcgcgccaatgttatacagatgccacatacccaccatagagacgcccagcgccgccactaccagtagcttggtcagcaccatgccagtggagattttgaacagtaatttttcaccgcgtgaggaaatcgccaccaggatgcagatcagcaccagaccataaaatggactatcggaaagcaatccttccgttacgccgaaagtatgcagataagaggcgctgtcgttagtaatcgccgtagaatagacgaacatccagatgacgagcatcacaaagtacagcgcgcctaataaaataccccagtttttgcccagatagccgctgatcacgctggggtagtctttacattccggggattccgccagcgtattaataaacagccgctggaacaggtacatggccggatagccaataatagaagagagtaaaaagacccaaagtcccatcaggccaacctggacaggaagaaaaacgatccctgcgccaatcgccatcccgatactcataatgacccaaccggtgtcggtactatcaaatttgatggcttcacgccattcgctttcagtcatccctgcccgacgcgccggggctgatgcgtcgaggattacgctggtattacttgccgattccataaaattctcgctcaatgtgtaggtagaggttttttttatttttcgtgccgcagcaaggcgatatgcagaacgtgaggtgcaggtactttcttgtaataagaaaatcatacgcgcacgataagagaaaaacttaccaataaaacgcctgcatttcttgtgggttaagaattcttttctatttactattggtttaatgttgttattttctctatttgacgcgtatcacaacaaaaaagggcgcactttggtgcgcccttttctcaacttctgtcttctacgttatcccatagcctgctcactctgcgcctgtcgggtctatccacaaacgactttaatcgccagaccgccgcgcgacgtctcgcgatatttgtcgttcatgtctttacccgtttcgtacatggtttcgattactttatcgagcgaaacccgcggttcagaggtacggcgtagcgccattcgcgccgcatttaccgctttaacggcgttaatcgcattacgttcaatacaagggatttgtacctgacccgccaccgggtcacaggtgaggccaaggttatgctccatcgcaatttccgccgcaatacagacctgcgccgggctgccgcccagcagttctgtcagccccgccgccgccatcgaacacgcgacgccaacctcgccctgacaccccacttccgcgccggatatcgaggcgttcatcttgtacagcataccaatcgcccccgccgacagcagataacgggcgatagagttggcattgaccggacgacggaatttgtcgtaataggccagcaccgcaggaataatgccgcacgcgccgttggtcggcgcggtgaccactcgcccgcccgccgcgttctcttcgctcacggccagggcgaacatgttaatccagtcaataacgttcatcggatcgcgggagagattatcgctggagaccagcagacgccgtaacgctaccgcgcggcgtggaacgttcagcggccccggcagcacgccctcagtattcatgccacgttcaattccggtcgccatcacctgccagatgcgggcaaagccagcgtcaatctgctctttgctccgcaacgccagttcattttgcatcatcaggccggaaaccgagagcccctgtctttcacacagcgtcaacagttcgctggcggaatgaaaatcatacggcaccgatttttctacgtcgtgcgactgaccaaaacgctcctcttcgacaataaagccgccgccaatagagtaatacgttttgtgtaaaagcggcgcttgtccgttccaggcggtaatacgcataccgttttcatggcgcgccagggtttcagcgtgaaagaaaatactgtcggcgacgggaaaatccaccacatgcgcgccacccgccaccgataaacggctgctgcgggcaacctcctggataaacgccggaatgctatcaatattgacatcctgcggcgtattgcccgccaggcccataatgacggcggtatcggtcgcgtggcctttgcccgtcagcgatagcgatccgtaaagatcaaccgtgatgcgcgtcgttcgcggcaggtcgccgctgtcgatcagccgatcgataaaacattttcctgcattcattggccctacggtatgggagcttgaaggtccaatgccaatcttaaaaatatcaaatgcgctaatcatatctccccctaagattaccgttcagcgaagatccgtcgcggggcgatccacacgatcgccccgttcacgttacatcgcctgagtaaaggtgcgcgaaataacgtcctgttgctgttcacgcgtcagcgcattgaagcgcacggcatagccggaaacgcggatcgtcaggttcgggtagttttccggatgttcaatcgcatccagcaacatttcacggttcatgacattgacgttcagatgctgcccgccttctacctgtgcttcatgatggaaatagccgtccagcaggccgacaagattggttttccgcaccgcatcttctttcccgagcgccgcaggcacaatcgagaaggtgtacgaaataccgtctttggcgtaggtaaacggcagtttcgccaccgacgtcagcgaggccaccgcccctttgcggtcacgaccatgcatcgggttcgcccccggcgcgaacggcgttccggcgcggcgtccatccggcgtattgccggtcttctgcccgtacacgacgttcgaggtgatggtcaaaatggactgcgtcggcaccgcattgcgatacgtcggcaacacgctaattttttgcataaagcgtttcaccaggtcgcaggcgatgctgtccacgcgctcatcgttgttgccgtactgcggatactcgccttcaatagcaaagtcgatggcaaggccgttttcgtcgcggatcggcttcacctgagcgtacctgatggcggacagggaatccgccgccaccgacagtccggcgatgccgcacgccatcgtccgatacacatcacggtcgtgcagcgccatcagcgaagcttcatagctgtacttatcgtgcatgtagtgaatgatgttcagcgcgctaatgtactgcaccgccagccagtccataaaatggtcgagactctccattaccgcgtcataatccagcacctcatccgttaacggcgcggttttcggcccgacctggattttcagtttctcatcaacgccgccattgatagcgtacagcaacgttttggcaaggttggcgcgcgcgccgaagaactgcatctgcttaccgatgaccatcgggctgacgcaacaagcgatggcgtaatcgtcgctgttaaagtcggtacgcattaaatcgtcgttttcatactgcaaagatgaggtcacgatggagacctgcgcagcatatttcttgaatgccaccggcaacgcttctgaccacagtatggtcaggttcggctccggcgctggccccatcgtgtgcagggtatgcagataacggaaggagttcttcgtcaccagcgtgcggccatcaagccccatcccgccaataacttcggtggcccagatcggatcgccggaaaagagcgaatcaaattccggcgtgcgcaggaaacgcaccatgcggatcttcatgatgaaatggtcgatcagttcctgcgcctgctgctctgtcagaaggcccgcgttgaaatcgcgctcaatgtagatatcaaggaacgaggcggttcttcccagcgacattgcaccgccattttgcgattttaccgccgccagataagcgaagtagagccactgtaccgcttcctgcgcgttccgcgccgggcgggagatatcgtagccgtatttcgccgccatctcctgcatttgcagcagcgcgcgacgatgctccgccaactcctcacgcaggcgaatcgtcgcctcaagattctgtccctgctccagattcgactgcaggtcggcgaattgcagctcgcgttcgcgcaccagataacggatgccatacagcgcgacgcggcgataatcgccaataatgcgcccgcgaccataaccatccggcaaaccggttaatacgccggatttacggcagcgcagcatatccggcgagtaaacatcgaatacgccctgattatgggttttccgcaggtcggtaaaggtatattcaaaatcggcgtccatttcgcggccataagcgtggaatgaacttttgatcatgttaacgccgccaaacggatgcaaagcgcgtttaagcggcttatccgtttgtaaaccgacgattttttccagctctttttcaatataccccgcatcgtgcgcggtaatcgtcgtcgcgatgttggtatcgaaatccaccggcgcatgggtcgcgttctcgatacgtattcccgccatcaccttttcccacagcgccgtggtcgctggcgtcgcgtcggcgagaaaagattcatccccctcatagggcgtatagttatgctgaataaaatcacggacattaatttcttctttccagtccgtacctttaaaatcacgccatgcttcggcatacagcatatcgctggtatcgatatttaccttcatgaaaaataatctctctacagaacagccgttaagttatgcaaattccactggtgctttcacgttgcctaaatgaatggcatcaagggcaatcattttctcttcattcgtgggaataacagcgcaaataacctgagaagggttagcggaaataatgcgctcgccgtgagaattcggctgcttattcatttcaacgtctaacgtaagccccagtacgcccagatgttcaatgaccaactggcgaattaatactgaattttcaccaataccaccggtaaaaataatgccatccaaccgatgtaacgatgccgcgtgtccggcaatatgacgggcgatacggtgaacaaacgtttttatcgctaaccgggcgcgctcatgtccttcgtgccaggctttttccaggactctaaggtcggatgacaaaccggagatgccgagcaaaccggactctttattcaccactcgctccagatcgctcaacgtctgcccggtttctttggctatccacgccatcgcgccgaaatcaacgtcgccgctgcgagtccccatcatcagcccctcaagcggcgtcatccccattgaagtatccacgctctgaccattgcgtaccgcgcagatagacgccccattgcccagatgcgcgacaatcagacccgagtctttttcatcgaggtcaagcagttcatacgcgcgccgcgaaacatagcgatgcgacgtaccgtgaaagccgtagcgacgcacgcccaggctggaaaaatactcccacggcaatccgtataaataggcttccggcgccagcgtctggtggaaactggtatcaaataccgccacctgacgcacggccgggaaaagatgccgcgccgcgtcaatgccgcttaaattagcgtaattatgcagcggcgctaaaggcgatacccgacgaatattatcgataatctcatcggtaataatgacggactgcgtaaataactctccaccgtgcgcgatacggtgaccaattaatgccacgctatccgttaaatcacgtttttccagctcaaaggcaatggcttttaacgcgtcctcataattagagtgtgcgaggtttatcggcttatcgccattaatagataaaaaggcgttttcagtattcattccatctgctattcccgccattaaaacatcacaggtagcgacatccagtacagagaatttgatagaagatgatccgcaattaatgaccagaacgaccggaaattcattcatgtagtgcctccgtcgatgtcagcctgcgtccgcgccctggggcggacgcaggctaaacgtgaggattagaacaatttgtagacaatattcaggatggtcagcagaccaatcagggtgacgaacacgttatccagacgaccacggtacttcgccagcgacggcgctttacgaatggcgtacatcggcagcaggcataacagcgaggcgataatcggcgcgcccatcgcttcaatcaggtccagaatgttcgggtttgcgtaagctacgacccaggtagaccccataatgaagatcatgctgatggtgttaagcttgcccatagagactttggttttatcgcctttataaccaaatttcagcaccaggccgttcagcccttccagcgtccccaggtagtggccgaagaaagatttgaaaatagcaaccagcgcgatgatagacgcgccatactccagcaccgttgcaaaagtagattttgtccccgacaaagaggcgaaatggttggccaggtaggaaagtaccggaatgttctgcgctttcgcatccgccatgttctgcggggagagcgtaaacaggcagctaaaggcgaagaacatcaccacggcgaccatcagcatactggcgcgcgagatgatctgtgaacatttacgctcggtaaattcgcggccaaactctttctcatactcttcacgcttagacaccacgaaggaagagacgatgggcgaaaagttaaaggagaacaccatgatagagatgcccagccacaccgtaaccagtatgccatcgtgcccggtcagcgcgatattactgagatcaacctgatcgataaccgccgagttccagtaaggaatcagcgataatgagattagtaccagactggcgataaacggccataccaggtaactcatcaccttaaccatcagatctttaccaaaccagatcacaaaggccatcagcagcagcaagaacagcgccacgaaaccgcgattcaacgctggcatctgcagctggttttcccaaaacgtcatgaacgtgttagtaatggtgacgccataaatccacagcagcggacaaatcgcaaagaagtaaaggaacgtgataactaccccgcccgttttaccaaagtgctcttcgaccgtttccgtaatattgccggacggattagatccggataaacacagacgcgccagcgcccggtgacaatagaacgcaatggggtaagctaaaaccagcatcagaagaatggggataagcccgccaaacccggcgcggatagggaaaaacagcaccccggcgccgatggcggtaccaaataaacccagcgtccacgtcgtgtccgatttacgccatgacgactgttttgcctggctggatacaatgctatcagtagtactcatatcctatcctcacgaaaagattaagcgtcaactaaacccgtaatttgtgatacccgagaaagatcgatattgccgccagaaataatactgaccgtttttctgttctgaatatggctatctaatttcccacttaatagtgcggcgcaagccagagcgccagcgccttcagtaataaccttattgcgctgaattaaagcgatcatgctgttacgaatttcatcttcgctaaccaggacaatgtcatcgactaattcacgaacgatttcataggttaaattacccgggcgggagacatcacaaccatccgccagggtgccggtcgttcggtgcgtggttatttcgccagtgtaataagacgccgccataccgtgaacattttcggcctgtacgccgataactttaatggtcgggttaatcgatttaatcgcaatggcaatacctgcaattaaaccgccgccgccaataggcacgatgacattatcgacatcgtacagatcttccataatttccagaccaatagtgccctgtccggcaatgacttttggatcgtcgtaaggcggaataaaaatgcggccttcggtttcgacaatttcactcaccttagcgatggtgtcattgaagttgtcaccgtggagcaccacttccgccgaataatcacaggtggccgccacttttgactttggcgcgcccttcggcatcacgactttgccgtcaatacccagcattgcgcaagaaagagaaacgccctgtgcatgattacctgcggaacaggccacgacgcctttacgtttttccgcctccgttaacgagctaagtttgttaaaagcgccacgaattttaaatgaacccgtacgctgcatattttcaaacttgagaaatatttcgcctttgcaacgttcactaaaatagttagagcgaggcattcccgttttatatatcttccccgccagtctttttttcgcttcgaggatatcttcaattgcaaccgggagatcgtatgtaatgtgcattataacctcttaacctgggtattaaaaataagttaccgttgcccactgttcaaaagaaacaggtgacgtcaatttcgctaaatatgtttattccatatcattcaatttctattaactgcctgcgtctgcatccattatatgatgaatattgtttagccaattctactaatactgaagcggcttttttgatacgataatttttagaccataccgccgcataacgtgcgacgggtaacgtgtcttgtatgggtatcgtgataaattgattagagccaaaaggcgtggtcatatcgcagggaataacagttaagaaatcagcattgagaacaagattatatattgtgacgacggaatctgttttaacaatgttttcgatgctgatgccatttcgttgtagagtggtgagtaattcgctgtagtagcccatattcgtttgcggcaacacccactgttcgtcttttaacgattccagtgtgatggtgccggtgcatgttcgggacttgctggctaccaggacaaactctgattcaaacagcggctcgacatgcagatcctgtagctgcatttcattactgagcgtaccgatagcaaagtccagccgcccgtcgcgcagggccggcagaaatgaagagagctgggcttcgtacatggatacctgcgcttttggaaagacctctttgaacttatgaatcatatcggacatgaaggtaaagccaatcagcgaaggaaagccaaacgagacgtcgacaacggtattgcacgtcatactgttcatctcgttgatcatgtttttcatttcgcgggtgatagattcagaccaggaaagcagtacctgtcccgcttcggtcaacgtaacgccggtatttttacgtacaattagctcaacgccaaaataggcctcaacatcgctaatgattttactgacggcgggttgggttaaccctaacgattttgcggcagaaccgatagaaccacttctaatgacttcctgaaagaccaccaaatgctgtgttttagggagaacaagagtattcatatctaccgctctgaaataacattgtgaacggcaggaagtgtagcaaattaaatcttaaaggttatgtgcgaccactcacaaattaacttaccacaatttttacatggtttttattaaataaagaaaacctgatatttcaataggttacaaaaataaagcagtaacttagcctgatttcaatcaaaaaacaggggcgggataacgatatattatggcgataaccagcctattttatctcctatttttgatatcccatgaagacgatatttcaatcaattacgggacattttatcgacaattccagcgttaaatttaaaacgtaatttctcaaatttaagtataaaccgaaggtaaatgcgcttaaaaaccgttacgcgtcacatttttttaccttatttgtttgcaaagaaacatttaataaaattttaaccaaaatatttcatacatttaattttcatttaaaacaaataatttacaccgctttcttgctgtttttcaggatgtaattttgtgaaagaaatcgattgcttttcacttcaactaaaaatagcgcaatacatagcgttttgtgtttctcatcacaaaaacgaataatattatgtcaccacggctgtcaattaattgccggatggtgacgctggcgtcttctgcaacctctatacccttcaccggcctgataagcaaaaacccgccgaagcggattttatgaagaggtgaaactgaccgataagccgctttctttcgggtatagcgtcgtggacagtcattcatcctgtcgccctgtaaaagcaaaaacccgccagcttacactgacggggtttatgaagagatgaaactgaccgataagccgctttctttcgggtatagcgtcgtggacagtcattcatcctgccgccctgtaaaagcaaaaacccgccagcttacactgacgggttttatgaagaggtgaaactgaccgataagccgctttctttcgggtatagcgtcgtggacagtcattcatcctgccgccctgtaaaagcaaaaacccgccagcttacactgacgggttttatgaagagatgatactgaccgataagccgctttcttttgggtatagcgtcgtggacagtcattcatcctgtcgcccggtaaaagcaaaaacccgccagcttacactgacgggttttatgaagagatgatactgaccgataagccgctttcttttggacatagcgtcgtggacagtcattcatcctgccgccctgtaaaagcaaaaacccgccgaagcgggttttatgaagaggtgaaactgaccgataagccgctttcttttggatatagcgtcgtggacagtcattcatcctgccgccctgtaaaagcaaaaacccgccgaagcgggttttatgaagaagtgaaactgaccgataagccgggttctgtcgtggacagtcattcatctaggccagcaatcgctcactggctcaagcagcctacccgggttcagtacgggccgtaccttatgaacccctatttggccttgctccgggtggagtttaccgtgccacggactgttaccagccgcgcggtgcgctcttaccgcaccctttcacccttacctgatcccacttacgtgggccatcggcggtttgctctctgttgcactggtcgtgggtttcccccccaggcgttacctggcaccctgccctatggagcccggactttcctcccctccgcccgtctccccgaaaggacgacgacgaagcggcgactgtctggtcagcttcggcgcgcagtatagtgggttcgcgcgactttgtcaccctgcgctgcgcattcctatcgccagagcggcagcaacatttctggatgcccgataaatattgtcaaaagcgccccgaaaagcctcctccagcgtcacgatgcgcgtgagtacgctaaagacagcgtcgatgccataatgatgtactatccctacatcgtgcgtcaggctgccggcaatgccaattactggcttatgatattttttcgccacatttgcgacgccaatcggcactttaccgcgaatactttggctatcaatccgcccttctcccgtcaccaccagcgtacagtcgtggatatgctcctccaggttcagtgccgccgtgacaatttcgatcccgctgcgtaattccgcaccgagaaaagccattaacgccgcccccataccgcctgccgcgcctgcgccgggtgccgtctttacgtcgacattcagcgatttttttatgatgtcggcatagtgagcaagatttctgtccagctcaacaatgttctcttcggtcgcgcctttctgcggcccaaaaattcgtgatgcgccgttgtcgccgatcagaggattagagacatcgcaagcgacacgaatcgcgcagagttttaaacggggatcgagctctgaaatatcaatgtcgcttagacaatgaaggcttccgccaccgtaaccgatatccgcgccgtttgcatcgcgcagttttgcgcctaacgcctgcatcatccctgcgccgccgtcatttgtcgcgctgccgccaatgccgataatgatattgcttgcgccgctttccagcgcctgcaatatcagctcccccgttccccgcgaggttgtaatcaaagggttgcgtttttctggcggaaccagcgccagtccgctggccgccgccatttcaataaacgcggttttaccatccccggacattccccagcaggctttcactttttcacccaacggcccggtcacccatgcggcgcgttcaacgccctgcgtcgcggcaatcatggcttcgaccgttccttcgccgccatcggcaaccggaacagagacatattgcgcatcggggaaaatttcccgaaatcctttttctatcgcctgcgctacctcggcggcagaaaggctttctttataggagtcgggggcaattacgattttcatagtggtagcctgttactgcacaacgccggatggcgtttcacttatccagtctgaaattcaggcccggatcgctacacgccatccgggcacaacgtcgttagcgagtgacttccactttcgccagtttttcgtagtagcacgccagcgcgctatggtcgtcattaccgtgtccatccgcgcgtaacgcctgcatcatttccataacggcggcggtcagcgggagctgcgcgccaacgccgtgggaggtatccagcgcattcgccagatctttaatgtgcagatcgatacggaaacctggcttaaagtttcggtccatgaccatcggcgctttcgcatccagtaccgtgctgccagccagaccgccgcgaatcgcctgatagaccagatccgggttgacgcccgctttagtcgccagcgtcagcgcttcagacatggcggcgatattcaacgccacgatcacctggttagccagttttgtgacgttgcctgcgccgatatcgccggtatgcaccacggaacccgccatcgctttcatcaggtcgtagtacttgtcgaaaatggctttatcgccccccaccatcaccgacagcgtgccatcaatcgccttcggctcgccgccgctgaccggcgcatccaacatctcaacgcccttcgccttcagcgcatcgctgatttcacggcttgccagcggcgcgatagaactcatatcaatcaatacggttcctggcttcgcgccttcgatgataccgttctcgcccagcgcaacctctttcacatgcggagagttaggcagcatcgtgatgatgacgtcacactgttcagcgatcgccttcgccgtagaggccgtttccgcgcctgcggcaatgacgtcagcaatcgcttcaggattacgatcggacaccaccagcgaataccctgcttttagtaagtttttgctcatgggcttacccatgatgcctaagccaataaagccaactttcatcgtcatagcgttctctctttccataccaggattattttttaaaggtgtcggcaagcttctgcgtgctggcgcggaatgcgcctaaatcgctgccaacggcgacaaaggtcgcgccccattccagataacggcgggcatccgcctctaccggcgccagaatgccgcacggtttaccgtgcgctttagcgcgggcgaaaatatgttgaatcgtctgctgcacgtcagggtgagaagcattgccgagatgacccagcgcggcggccaaatcgcttgggccgacaaaaatgccatcaacgccttccgttgcggcgatggcatcaacattgtcgacacccaactggctttcgatttgaacaataatggtgatgtttttgttcgactgcgcaaagtaatcaggcaccgtaccgaacatattcgcgcggtgagaaacggagacgccgcgaatgccttccggcgggtaacgcgtcgaggcgacggcgcgagccgcttcctcttgcgtttcaacaaaggggatcaggaagttataaaacccaatatccagcatccgtttgataatgaccggttcattggttggcacacgtaccacaggcgcgctggcgctgcctttcaatgccattagctgcggaattaaggtggtcacatcgttcggcgcatgttcgccatccagcaccagccagtcaaatcccgccagaccgagaacttcggtggtgattgggcttgccagtgcagaccagcagccaatctgcacctgttgcgccgctagcgccgctttaaacttattcgggaaaatagcgttattcatcgcttataccttcgcttatttctttaattctctacatgtgatgccgccaccataacttatagcaacgacaataaaatgcttatctgaaatcagaatgggtctccgcattctatttctaatgtggtacacatcctgtagcacaatataccgttctgatatctttatcgtcttttattattatcatggtattttcaaataactcgtcagatacactgaattcgccattcagtataaacagcctatggcggataatcattgtgcaaacgctcattaaaaagggattatttaacgcttatttttgagcatacgcccatgatactgggcgctaatgcacacatttacgctttacccggcctacataaaaaatttcataatttgcggtgatctggatcacattcttatatttatactcctgtcattcttatttcattatgcatgaactttatttcttatattgagatttaacgatttaaccataaccaaaatagataatcctatttctatcatccaggctggagaatgttgaacaatggccaatatcgaaattcgccaggaatcgccatcggcgttttatataaaagtacatgaaaccgataatgtcgcaattattgttaatgaccacggtcttaaagccggaacacgttttccggatggcctggaactgactgaacatattccgcaaggccataaagttgctctgacggatatccccgctcacggcgaaatcatccgttatggcgaagtcatcggttatgcggtacgcgacatcccgcgcggaagctggatcgacgagtcgctggttgaactgccaaaagcgccgccgctgaatacgctaccgctggcgaccaaagtaccggaaccgctgccgccgctggaaggctatacgtttgagggctatcgtaacgccgatggcagcgtcggcaccaaaaatctgcttggcattaccaccagcgtgcactgtgtggcgggcgtggtcgattatgtggtgaaagtgattgagcgcgatctcctgcccaaatacccgaatgtcgatggcgttgtagggctaaaccatctgtacggctgcggcgtggcaatcaacgcgccggcggcggtcgtgccgattcgcacgattcataatatcgcgctcaaccccaattttggcggcgaagtgatggtgattggcctcggttgcgaaaaactgcagccggaacggctgctggaaggcaccgaggatgttcccgccatcgccgttgaaagcgccagtattgtgcgtttacaggacgagcagcatgtcggctttaaatcaatggtcgacgatattttgcgggtcgccgaacgccatctgacgaaactgaaccagcgccagcgcgaaacctgcccggcctccgagctggtcgtcgggatgcaatgcggcggcagcgatgcgttttctggcgtcacggcaaacccggcggtgggttatgcttccgatctgctggtacgctgcggcgcgaccgtcatgttctcggaggtcaccgaagtgcgcgatgccattcatcttctgacgccgcgcgccatcaacgaagccgtgggtaaacgcctactggatgaaatggcctggtacgataactaccttgatatggggaaaaccgatcgcagcgctaacccgtcccccggcaacaaaaaaggcggcctggcgaacgtcgtggaaaaagcgctgggctctatcgctaaatcgggtaagagcgccattgtcgaagtattgtcgccgggccagcgccccaccaaacgcggcctgatttacgccgcgacgcccgccagcgatttcgtctgcggcacgcagcaggtcgcttccggcattaccgtacaggtctttaccaccggacgcggcacgccgtacgggctgatggcggtgccggtcattaaaatggcgacgcgtaccgagctggcgaaccgctggtatgacttaatggatatcaatgcaggcaccatcgccacgggtgaagagacaatcgaagatgtgggctggaagctatttcactttattctcgatgtcgccagcggccggaaaaagactttctcagatcaatggggattgcataaccagctggcagtgtttaaccccgcacctgtgacctgatctattctggaaagcgcctcgcaaaacatggcttaagggccatgttttcatatgtttgataaactgcgccatgttcataccggatatggcaaaaacacctaacccaccataaaaccattcaaattcaataaattgaaattctatgccaagcgcaaccttacgtttctcactaatttgagtcgcagcacatgcaatttgaggtatgtcgaatataacgacagcctattaatcacctttacttaattctgctgcctcatcaattctttaatttgtgccagcgtggacgtgccttccatcggcccacgcgcagagatagccagcgatcctgcggcattagcatgggctaaagcatcgggtacggaatatcccgcaagaaacaggctgacaaaggttgcgccaaagcaatcgccagcgcctgtaggatcaaccaccttcaccggatacccagccacatgatgttgttcgtcttttgaatagtaactggctccacgggcgccacgtttaatgatgacatgggcaattccacgcttgtgaagccttgcgacaattttctcttcatcgcgggatttgctcaggccgaaataatccagttcgccatcgcttggcaggaagaaatccgtgtaatcaagaatatattcaaaggcctgcgacatttcgcggatctttagcatctctttacggatattaggatcgaaagaaattgtgccaccattttcttttacaatgctaatcgccttgcgtacggcatcgatcaaacgaaaggaaaataatgacgatcccataatatgaaagtggcgatattgcctgagtaatgtttcatcaaggtggtcggcactcagcaaaccgcacgcactgtccggcatgttgaaaataaaatctcgctgggcctggcttcggtagctgacaaaagcactacctgttgtggcgttcggcagtacggaaattccctgtacatttacgccatcgcgcgacaatcgggtaatattcataacgccaaaggcatcgttgccaacacagctaaacaacaatgaacgaaaaccaagtttagcaacctgatcggcaaatatggcaggcgccccactgggatacggcccccaaaattcccccggtgaggaaaatccctggttctctttttttgccagaaactcgacgagcaattcacccaatgttgcgattgttatgttcatgcgttgtccttcatcttgcctgatgcagggtcgggtttatccaggtcagacattcgttattggtatagctgttggttaagccgtcggccagaaaccgtgagtggtactcagcggcgacaatctgtggcgtaataatcgcgctcagcgtattcagttttcctaccggataacgcgccacatcatgaatcggacgctgcgccaccacggcaatactctgtccactaaggcgcaggcattcacttagcaaagcagctgcactttcgtttttcacgttgagcgtgccatcctcgctgatatggtccaccatcaccagacaacatgacggttgaaattgttgcaaagattggatggcgatttcgccccccaacgcctgaccactatgccccagtacaccgcccaacaacacaatttcaccatcgatataatcacgggccggtgcaacatggctaagatcgttgatgataaggcacagatcccgataatcgcccaggaaaggaagcgctttacgcaacacctctccggcccccagaaacacggtatcgtcgtcgcagaccagacgggcaacttgcttagccagttcaagctctacgctatgctctaacgcctgcgactgcaccacttcatggcttaccgctgctctgacgggttgggccgtgtaaatcgctccgccaaaggagcgtttcagatagccttgctgctccaggtaattgagatcattacggatcgttacccctgaaaccgataacatttcagccaaatcgtctacttttatttcgccgtttttacggacgatttcggcaatgtccagacgccttttcaacaggctggtagatggttttgccacaacataccctttttttccgcttcgtcgggaagttatcccgtgctttaactttcatttttaaacttctgacaggggatgtcaattttgcaccacgtcaccgaatgctcaatggaaaacatcacaataaaatcaagtaattatagaattttcatatcttccatttacttacaaaacaaaatttaaatccacactttttctttcatttaagaaaaattatcctgcttttgtgttgatgatcacaatcatgtgtggcaatgatcgttacattactttcaaaacgaaggttatttttattttaaactttaatttcgaaagttataaacggagaccactatgttcattatttccagtaaaaatatgctccagaaggcccagcatgcaggctatgccgtgccagcctttaacatccataacctggaaaccttgcaggtggtggtagaaaccgccgcagaaatgcgctcaccgctgatcgttgccggaacaccaggcacgtttagctatgccggaatgggtaacattgtggcgatcgcgggcgatctggctcgtgaatacaatctgccactggccattcatctggatcatcatgaatcgttagccgatattgaaagcaaagttatggcagggatccgttcagtcatgatcgatggttcccactttccctttgaagagaatgtggcgctggtgaaaagcgtggtcgatttttgccatcgctacgacaccagcgtggaggcagaactgggccgccttggtgggatcgaagatgatttagtggtagacagcaaagatgccctttacaccaatccacagcaagcacgtgagtttgtggcgcgcaccggcattgattcgctggcggttgctatcggcacggcacacggcatgtatgccgctgaacctaaacttgattttgagcgactggcagaaatacgcgctctggtggatatccctctggtattgcatggggcatctggtttgccggaaagcgatattcgccaggccatcagccttggggtatgcaaagtcaatgttgccaccgaactgaaaatcgccttctccgacgccttaaaagagtatttcctacaaaacccgaaagccaatgatccccgccactatatgcaaccagcaaaacaggcgatgaaagaggtggtacgcaaagtaattcatgtttgcggctgtgaagggcaactgtgaggaatcgcctgtgatctacacgctaacacttaatagcgcgattgatatgaatatatttagcgatcctttacagccaaatattgtcaatcgcactcaccacaccgagttttgcccaaatggtaaaggggtaaatgttgcgctggttctggatcactttcaaatacctgcgcatatattaggcatttttggtggtttcaccgggcattatattgtagaaagcctgcgtacccgaaaaatgccagtcacaccagcatgggtagaagaacccacgcggattaatattttcattcatgacggtaagcaggaatataaactggtcaaccctggctcatatattccagatgaatgtaaacaacaaattatcacgattatttcgcaactgcccgatgcagactatctggtgataagcggcagcctgccacaaggtattgaaagccgcttttacgcagaaatcatgcatatttgtcagcaaaaaaatatcggcgtaattttagatattagtcatccgtcattacgtcagttactggagttcaaaccgttattaattaaaccaaatgatgaagaggttaaagcaatattcggtttaactgtctctgacgacaatgatgcgaaaaatactctaaccactttacatgcacttggtgcacaaaatgttctgctaacccttggcgctaaaggaatgtatttctccaatgggattgattactggttttgtagcgcgccaacggttgatttggtgagctccgcctgtgcaggcgatgctgcactggccgcctttctcagccagtggttatctacaggagaagtggaatatgccttatctcttgccagtgcaacaggagctgatgtcgcaagttctgccggactaggccaacttgcggcaatagaaaccttactttcgcaaatccacgtcagaaagctgtaggttaaattacaatataaggtctgcttatgaaaaagatcattgcagtgaccggctgccctaccggtattgcgcatacatttatggctgaagaagccttaaaaaatgccgcgaaaaaattatctgttgaaataaaagttgaaaccaatggtgccagtggcgttgaaaatgctattcaacctgctgatctggtagatattgccggagtcattattgcggcggataaagatgtcttacctgatcgctttaatggtttaccggttattgaagtaccggtaaaagaagcaatccatcatcctgcggagctgattaacaaagttattaatggtgaagccccaatacgtaaaggcgaatcaaccaccagcacggaaattatcgaaaaagaatcactggggcgacaaatttataagcacctgatgagtggtgtttcaaatatgctaccttttgtagttgccggaggcatattaattgcggtgtcgtttttatgggggatttattccgctgatcctaattcagctgaatacaatgcaaccgccgcaatgctaatgaaaatcggtcagcaagccttttcgattatggttccggtctttaccgcttatattgcattctctatttctggcagaccagggatggtggctggatttgtcggcggcttactggcaaatgctaccggcgcaggatttcttggtgggataattgccggattcgccgccggttacctgatgttatgggtaaagaatcgactcgaaggcttaccgcgtcagtatgaaggcctgaaatcgatttttattatgccgctcattggcgtactggttattggcgtgttgatgtcgctgcttgggcaacctgtcgcagctatcaataatagcatgatgaactggctggcatcgctacaggaagcgaatccaatattgctgggtattgtggtgggtgcaatgtgctcctttgactttggcggcccggtaaacaaagccgcttatgtcaccggcacgcttttactgggccaaggcaacttctactttatggctggtgtgtctgccgcatgtattactccaccactggtaattgctctggcgaccaccttctttccaaaaggttttagcgaggaagaacgtgccgcaggcatggttaactatatcctcggttgtacacacatcactgaaggcgcgattcctttcgcagcgaaagatcctttgcgtgtcatcccgatgatgatgattgcttccagcatttccgcagtacttagctacagcttgcgtattcaggttccggctcctcacggcggcttcttaattttacctttggtgagtcagccgctggcctgggtgttatgtatccttgcgggctctgcatgtggtgcggtgatgcttggcctatggagattgtgggctgtgcgcaaaaattcagtcaacacaactcctgtagcaaaggctggaggtcagaatgcagctctgtgaacacgatatttttatcagcgatgagcgcctcgataaagtcaccgctctgcaccgtgtggtggaaaagttatctgcggctggcaataccacgactgactatttacgcggcatgttggatcgcgaagcacagatttccacttatctgggaaatggaatcgcgatcccacacggtacgccagagtctcgcgatgcggtattacaaaccggtgtaaaggtaatcgtttttcgccacggcgttgactggggtgacggcaataccgcgtatctggtcaccggaattgccgcgcgctccaatgaacatcttgagattttgcgccaactgactcgcgtgctcagcgatgacgctattctgcaagcactggctaaagccgaatcccccagtcaggttttagcgctactgactggatcgacgaccaatacgccagcagccgtggagttgcaggagggtgagcaggcaacgtttgtcatccataatccgcatggtttacatgccagacccagtgcggtactggtgaagtttatcaaacagtttcaaagccacattacggtagaaaatctggataacgcctccggcccggtggacgggaaaaacctgatgcgagtggtgtcgctcggcgcgaaaaaggggcatcgcttgttgttccgggcgcagggcgaagatgcacagcaggcactacgtgaaatcggggagcttatcgcctctggtgcaggcgagatgatcaccgttcccgttaccccaccaccagaagtcatgcagccaaagcgcagttggctatctcgattgtttaattagccttcatttgttcctccgtgcccgctccggcgggtacggtttttcatgacaaagtgaagttacagacattacacaccatttcgttaccttacatttcctttcgcaactttcatttatcagatcaaaatcacaaaacaacattacgaaagcctataaattctttcgaagaagaaaaacgaaagaactcggagataaaagtgaaagaaataattgctcgtcataaagcaggagaacatctgggcatctgttcagtttgttctgctcatcccctggttatcgaatcagctctgcttttcgatctcaatactgacaacaaggtattgattgaagccacatccaatcaggtgaatcagtttggcggttataccggaatgaaaccggctgattttcgtgattttgtttatggcattgctcaggaagtgggatttccacgtgagcggttgattcttggtggcgatcatttagggcctaactgctggcagaacgaaccggcagcggcggcaatggaaaagtcggttgagttaataaaagcgtatgtcgccgctggttttagcaaaattcacctggacgcgtcaatgtcctgcgctgacgacccgacaccgttggatccgatggtcgttgcacgccgtgccgccgtgctttgtaaagcagcagaagggaccgcaaacgaagaacaaaaatgccatctgacttatgtcatcggcacggaagtgcccgttcctggcggtgaagccagtaccatcggcagcgttcatgtcacccgcgaagtcgatgctgcacgtacgctggaaactcaccaaatcgcgtttcgtgaatcaggtctggaagaagcactgtcacgcgtgatcgccattgtggtacagccgggcgttgaatttgatcatacccagattattcattatcagccgcaggcggcacaggcgctctccgcatggataaaagaaacgccgatggtctatgaagcgcattcgactgattatcagacgcggcaggcctaccgtgcgctggtacgcgatcattacgccattctgaaggtcggcccggcgctcactttcgcgctgcgcgaagccattttcgcacttgcgcaaatggaaaacgagctgatctccccggaacaacgtagtcgggtactggaggtcattgatgaagttatgctaaacgaaccgggctactggaaaaaatactaccgtccaacctggagccaggcgatggtcgacatccactttagtttgtctgaccgtattcgctattactggccgcacccgcgtattcgtcaaagcgtagagaagttaatcgccaatctgaacaacgtcacattgccgctgggattaattagccagtttatgcccgtacagtttgaacgcctgtctgagggcgtgctcacccctacgccgcataacctgattattgacaaaattcaggatgttctgcgcgcttatcgcttcggttgcacgccggatgtcgcctgaataatggagaatttatgagccaactatttgtccgaaccggaatcacattcgactcgagccaacaggcgctggcgcacattggcaaagagatgctggcgaaaggcgtggtacatgatagttatccgcaggcgctggtggaacgtgaagcgtcttttcctaccggcattgcgctggagcgtcacgccgtcgctatccctcattgcgaggccgttcatgcgaaatcacccgctatctatctgattcgtccagataagccggtcatgtttcaacaggcggatgatgacgaagagattgccgtttcgttaatcatcgccttaatcgttgaaaacccggcggcacagctaaaacttctgcgccgcctgtttagtgagctacagaacccaagcaccctcgatgccctgttaagcgcgccggatgccgaactggcgatacgctttcaggaaaccatccttgagcctgagcagtgcgtccaggtttgataataaattgataataatgaggaataccctatgaaacgtaaagtaattgtggcctgtggcggtgcggttgcaacctcaacgatggctgcggaagaaattaaagagctgtgtgatgccaaccatattgagctcgacttagtgcaatgccgggtcaccgaaatcgaaacctatatggacggcgccgatcttatctgtaccactgccagggtcgatcgcgcctttggcaatattcccgtcgttcacggtatgccttttgtttccggcgtgggtattgaagcattacagcaaaaaattctgtccattctcatggggtaacgtatgtttagcgaaataatgcgttatatcctcgacttaggcccaacggtgatgctgcctctggtgatcatcgtgttctctaaactgctgggaatgaagcttggggattgttttaaatcgggtttgcatattggtatcggcttcgtgggtattggtctggtcatcggcctgatgctggattctatcggccccgcggcgaaagccatggcggaacatttccaaatcaatctccacgttattgacgtcggctggccgggttcatcgcccatgacctgggcgtcacaaatcgcgctggtcgcgatccctgtcgccatcggggttaacgtcctgatgctagtgacccgcatgacccgcgtggtgaatgtcgatatctggaatatctggcacatgaccttcacgggcgccatgctgcatctggcgaccggttcatactggctggggattctgggcgttgtggttcatgccgcctttgtctacaaactgggggactggtttgccaaagatacccgcgactattttggcctcgaggggattgctatcccacacggctcatccgcgtacctgggccccgtggcggtgctcgttgataccattatcgagaaaattccgggtctcaatcgtattcactttagcgcagacgatgtccagaaacgcttcggaccgtttggcgagccggtgactgtcggcttcgtgatggggctggtgattggtgtactggcaggctacgacgccaaagccgttctgcaactggcggtcaaaaccgcagcggtgatgctgcttatgccacgcgtcattaaacctattatggatggcctaacgcctatcgcgaaacatgcgcgtaaacgtctacaggctaaatttggcgggcaggagttcctgataggccttgatccagcgctactgctcggtcatacctctgttgtctccgcgagcctgatattcattccgctgaccatcctgattgccgtcttagtaccggggaaccaggtgctgccgttcggcgacctcgccaccatcggtttctttattgcgatggcggtcgcggtacaccagggcaacctgttccgcacgctgatttcaggtgtcattattatgggtatcaccctgtggatagccacccagacgattggcctgcatacccaactggctgccaatgccggagcgctaaaagctggcggacaagtcgcctcgctggatcagggcggttcccccatcacctggctgctgattcaactttttacctggcagaatatcgtcggcttcgccgtcattgccattatctatctggccggcgtactgctgacctggcgtcgcgcccgacagtttgtcgcggctgagaaagccacggcgctacagcaaagtcaaatcgcctcttaattttaggggagcaatcgctcccctcaccttcctggagaatgttatgaaatcagtggttattcacgctgagggagacgtgcgcgttgaagaacgtcccttaccacaactgcaagccgaggacgatgtgttggtcaaggtcgttagctcagggctttgcgggtcggatatcccgcgtattttcgcgcagggcgcccattattatcctattacgttaggtcatgaattcagcggctacgttgaatcctacggcacaggcgtaacggatatgcagcccggcgatgccgtcgcttgtgtcccgcttcttccctgctttcactgtccgcaatgcgaacgcggttacttttctttatgcaaacagtatcagtttgtaggatcgcgcagcgaaggcggtaatgcggaatatgtggtggtcaaacgggccaatcttttccgcttgccttctgatatgccgattgaagatggcgcgtttatcgaaccgattaccgtgggcttacacgcctttcatctggcgcagggctgcgaggggaaaaacgtaattatcgtcggtgccgggacaattggcctgctggccttacagtgcgcgcgggaactgggcgcgcgaagcgtaacggcgattgatatcaatccgcagaaactggaactggcgaaagcgctcggcgcaacgcatacctgtaatagccgggaaatgaccgccgacgacatccagaccgcgttgtccgacattcagtttgatcaactggttctcgaaacggcaggaactccccagaccgtctcgctggctatcgatatcgccgggccgcgcgcgcaactggcgctggtggggacgttacatcacgatctcaccctgacaacgcgtacattcgggctaattttgcgtaaagagctcacgctcctcggcagttggatgaactactccgcgccatggccaggagaagaatgggaaaccgcagcgcgcctgttggctgaaaaacgtcttcaactgacccctctcattgcccatcgcggcgatgcggaaagctttgcagaagcagtcaaagcgcttaatggcgcgcccatgcagggcaaaattttacttcaactttcctgatggtacgagccagcaacctgcgctggctcacatttcctttcgaaatttagcgttcacctttcgcaatccttcgtttaaactagttacagttaattatcaggcaaatcaatatgaactcatttgagcgaagaaataaaattgtcgacctgattaatacgcaaggcagcgtgctggtgatggacctttcaaatacctttggtatttctgaagtgactatccgtgctgacctgcgtctgctggaagagaaaggccttgtcacccgttttcatggcggcgcggcaaaaccgggaagtcatctggcggaaggcgacaatcaggaagtcattctggaagatcggtatcaactcgccagcgatccgaaaaagcggattgcccaggcggctgcggcaatggttgaagaaggaatgaccatcattctggatagcgggagcacaacattactgattgcggaagcgctcgcgcgaaaaagcaatattacggtgatcactaacagcttgcctgccgcttttacgctatcagaaaataaagatctcacgctggtggtctgcggcggtacggtacggcataaaacccactcaatgcacggcacgattgcggaacgatcgctacacggcatcagcgccgatttaatgtttgtcggggcggatggcattgatgcgacaaacggtattaccacgtttaacgaaggttattccattagcggcgtcatggcggcggcggcacacaaagttatcgcggtactggacgcgaccaaatttaaccgtcgcggctttaaccaggtattgccgatggacaagatcgactgtgtgataaccgatgacaccatcagcaaacaggataaagcggcattagcgaaaacaggcgtggaattaatgatcgtctaaaaaggagtcggttatgcgttgctgatcgcgagagtaagcccgaaggaaaggtccggcccgctatcaccgcccaatgcccccatcaatttacccacatcaatcacctgattgagtattaacacgatggcgataaaaggcggttcccgggcgctcgcttttattcttcctgctgctccagcgcatacttatacagcgcatttttcttcacgccgtgaatttctgctgccagcgccgccgcttttttcagcggcagttctgcctgtagcagcgccagcgtgcgcagcgcgtcggcgggcaggtcgtcttcttgcgctttatggccttcgacaatcagcaccatttcgcctttgcgacggttttcatcttctttgacccacgccagcagctcgccgaccggcgcgccgtgaatggtttcccaggttttggtcagctcacgcgccagcaccacataacgggattctcccaataccgcgacgatatcttccaggctatctaacaggcggtgggttgactcataaaaaatcagcgttcgcggttccgtttcaatggcttttagcgcatcacggcggcctttggatttcgccggtaaaaagccttcatagcagaaacggtcggatggcaggccagcggcgctcagggcggcaatcgccgcacacggccccggtagcggcaccacgcgaatccccgcttcgcgacaagtacgcaccaggtggtagcccggatcgttaatcagcggcgtaccggcgtcggaaaccagcgcaatgttctgcccttcttttagcttcgcgaccagcgtttccgctttttgttgttcgttatggtcgtgcagcgcgaacaaccgggcattaatcccaaaatgttgcagcaataaaccggtgtgacgagtatcttcggcggcaatcagatctacagcctgtaacacctccaacgcacgctgggtaatatccgccagattaccgataggagtaggtacaataaagagttggccctgagaattatccgccgattcgttttgtttcattgtgtcgtccgtattgccgatttaatattgagcattgcgtaaaaaaatatcactggatacagtatggtaccctcaacattttctcgtttgaacgccgcacgcgcgctgcctgtcgtcctggctgcgctacttttcgccgggtgcggcacccaggcgccagatcaaagcgcagcctatatgcagggttcagcgcaagctgactccgccttttacctgcatcagatgcagcaaagcgcagatgatagcaagaccaactggcaattactcgccattcatgcactgctgaaagaaggaaaaagccagcaggccgtcgacctgttcaaccaactcccgcaaaatctgaacgatacccagcgtcgcgaacagtctttattagcggtagaaatcaaactggcgcaaaaagatgtcgcaggcgcgcaggccttgctggataaactaaaacccgccgactttgcgccaaatcaacaagcgcgttactggcaggcgcagatcgttgccagccagggacgcccgtcgcttaccctgttgcgggcgttaatcgcccaggaaccgctactggcggcgaaagataaacaaaaaaatatcgacgccacctggcaggcgctctccgccatgacgccggatcaggccaggacgttagttatcaacgctgatgaaaatgtgcttcagggctggctggatctgcaacgcgtctggtttgacaaccgcaacgatccagacatgctgaaagctgggatcgccgactggcaaaaacgctacccgcaaaatccgggggcgaaaatgctgccgacgcagctcgtcaatgtacaacgtttcaaaccggcttccaccagcaaaatcgctctgctgctgccgctgaacggtcaggctgccgtgtttggccgtaccatccagcaaggtttcgaagccgcgaaaaacctcggcacccaggcggtggagatgcagcctgccgccgctcctgacgcgccggtcgaacctggcgtggaggagacgcaaccacaaatgaccaacggcgtcgccagtccgtcgcaggcctcggtgagcgatctgactgatgacgctccagcccagtccgctacgccagtcagcgcgccacaaactccccctgctacagcaagcgcgccggcggatccctccgctgaattaaaaatctacgatacctcttcccagccgttggatcaggtgcttgctcaggttcagcaagacggcgccagtatcgtggtcgggccgctgttgaaaaacaatgtggaagcgctgatgaaaagcaacacgccgctcaacgtgctggcgctcaaccagccggaaacggtacgtagcttccctaatatctgctatttcgcgctctctccagaagatgaagcccgtgacgcggcgcatcatatttatgaccagggcaagcagtcgccgctgctgttgattccacgcagcgcgcttggcgatcgcgtggcgaacgccttcacccaggagtggcaaaaactgggcggcggcatcgtgttacagcaaaaattcggctccgtagccgagctgaaaatgggcgtgaacggcggcgcgggtatcgcgttgactggcagtccagtcgccgccagcgtgcctgcgcagcctggcgtcaccattggcggtctgaccatccctgcgccgccgaccgacgcgcaaatcaccggcggcggacgcgtagacgcggtctatattctggctacgccggaagagattggctttatcaaaccgatgatcgccatgcgtaacggcacccagagcggcgcgacgctgtatgccagctctcgcagcgcgcaaggcacctccggccccgacttccgtctggaaatggagggtttacaatacagtgaaattcctatgctggcaggcggcaatatgccgttgatgcagcaggcgctgagcgctgtacataacgactattctctggcgcggatgtacgccatgggcgtggatgcctggacgctggcgaaccacttttcgcagatgcgtcaggtgcaggggtttgagatcaatggcaataccggcgcattaaccgccagcccggattgtgtgattaacaggaagttatcatggctcaaataccagcaaggggagattgttcccgccagctaacgcgtaaacaggctggcgacgcgtgggaagctgccgcgcgtcgctggctggaaagcaaaggactgcggtttatcgccgccaacgtgcgcgagcgcggcggcgaaatcgatctgatcatgcgcgacggaaaaacgacggtttttgttgaggtccgctatcggcgctccgggctttatggcggcgcggcggctagtgtgacccgcagcaagcaacacaaattattacatactgcccgcttgtggctcgcccgccagaatgggagttttgatactgtggattgtcggttcgatgtgttagccttcaccggaaatgagattgagtggtttcgggatgcgtttaacgaccactcataattgaagattttaaggattagcgtgctcgaaagaatcaaagtttgctttacagaaagcattcaaactcaaattgctgcggcggaagcgcttccggatgccatttcccgcgccgccatgacgctggttcattccctgcttaacggcaacaaaatcctctgttgtggaaacgggacgtccgcggccaacgcacagcattttgctgccagcatgattaaccgctttgaaacggagcgacccagtttacccgccattgcactaaataccgataatgtggtcttaactgcgatcgctaacgatcgcttgcacgatgaagtttatgcaaaacaagtccgggcgctgggacatgcaggcgatgttttattggcgatctctacgcgtggtaatagtcgcgatatcgtaaaagccgttgaagcagccgtcacacgtgacatgaccattgtggcgctaaccgggtatgacgggggtgagctggccggactattagggccgcaggatgtcgaaattcgtatcccttcacaccacagcgcgcgcattcaggaaatgcatatgctgacggtaaactgcctgtgcgatttgatcgataacacgctttttcctcaccaggatgattaaggagtacacatgaaggcattttcgccgctcgcagtccttatttctgcgttgctattgcaaggttgcgtcgccgccgcggtagtgggtacggcagccgtcggtaccaaagccgcaaccgacccgcgtagcgtgggcacccaggtggatgacggaacgctggaactgcgtgtcagcagcgcgctgtcgaaagatgagcaaatcaaaaaagagacgcgcatcaatgtcacggcttatcagggcaaagttttgttagtgggccagtcgccaaacagcgaactctccgcacgcgctaaacagatagcgatgggcgttgaaggcaccaccgaggtctataacgagattcgccagggtcagcctatcggcctggggaccgcctctaacgatacctggatcaccacgaaagttcgctcacagctactgaccagcgatcaggtaaaatcgtcaaacgtgaaagtcaccaccgagaatggcgaagtgttcctgctgggcctggtgactgaacgtgaaggtaaagcggcagcagacatcgccagccgggtgagcggcgtgaaacgcgtgaccaccgcctttacgtatattaagtaaccggtgtgccgggtggcgataagaatgtgtaaaccgcgtcgccatccggtaaatcatccggcttcgctactccgctttttcccgcagttgcgatgaggtcagaatcgtcacgccttcttgtgctggcgccagcgcttccgccagcatggcccgcgccacatcccgcgcatcgatcgatttccagtttcctggcaacagccggaatagcggagcgaaaagcgtttcattcacccgccgcgttgttctgtcgccgagcagcatagaaggtcgggcaatcgtcaaacgaggccaattttgcgcgattaacgcctcctccatttctcctttcacccgattgtagaaaaacggagagtgcgcgtttgctcccattgcgctgaccaccaccatgtgctgcgcacccagtcgacgtccggtcagcgcagtatcaaccaccagcgtataatccgcatgaataaacgccgctttacttcccgcttcacgccgggtcgtgcccaggcagcaaaaaacaatatctaccgggtcggtcacctgagctaacgcatcggtaagctgcggatcgtgagggttataaacgccgacaatatccgtcagcgggcgacgcgtcggcgcggcgatagcgctcacctgcggcgtgttgattaacattctcagcagatgtccgccgaccagtccggtcgcgccggtaatcagtacctgactcatcctcgctcctttacagatttgtccaccttgcactctcggccctatcgaccaggcttaatagtctacgaggtaagtatccatcattgtggaaaatttgccttacccgacgccaccactgcggaggaaacgcatgagtaagaaaattgccgttttgattaccgatgaatttgaagattcagaatttacctcgccggcagcagaattccgtcaggccggccatgaggtcatcaccatcgaaaaagaggcgggtaaaacggtgaaaggaaaaaaaggcgaggccagcgtcaccattgataaggctattgatgacgttcgtcccgacgagttcgacgccttgctattgccgggaggtcattcgccggactacctgcgcggcgacagccgtttcgtggattttacccgcgatttcgttaacagcggtaaaccggtttttgccatttgccacggcccgcagttgttgatcagcgccgatgtcattcgtggccgcaaactcacggcggtgaaaccgattattatcgatgtgaagaacgcgggcgcggaattttacgatcaggaagtcgtcgtcgataaagatcagctggtgaccagccgcacgcctgacgacctgccggcatttaaccgcgaggcgctacgcctgctgggcgcgtgagtcacgtaaccagtgcagttttttaccaaaccccagcgtgttgtcggtgaatttaatttcatccagccggatttcccataccggcgctggcagcaccctggcgaccgggaagcgacgaaggtaagctttacgcgcggcgtcgctctcctgcccctccagacggcgaatttcccctttaaactgcacgccgcgaatgcgcgccaccgttttcggctgcccattgaccgttcccgcaactggcgcgcacgcgccggacatttgcgcatggcgggttttatcatccgttaacagatacagtgcgacgttttgcgcatcgaacaaataaaacgcattggcgcaccacagctctccctcatggtgtacgcaccaggtcaccacgtgttgtttcgccagccaacggccaatagcggtaagtgtgtccatctttattctcgcttatactgggaacctgaaaattatcatgctgatggcgacaatgaccccctggtatctgtatctgattcgtactgcagacaatgcgctttacaccggaataaccaccgatgtggcgcgtcgttacaggcagcatcaaacgggaaaaggcgcaaaagcattacggggaaaaggcgagttaacgctggcgtttgcggcgcaggtcggcgatcgctcgctggccctgcgcatagagtatcgcatcaaacagctcacaaagcgccagaaagagcgccttgtgacggaacgcgaagcgtttgaggcgctgctgtccagcctgcaaacgccggtgcttaaaaacgattgaagtggtcgtgatactccaccagccccgtcacgccctccagcgcatcctcagccaaacggtgtacctggaaagcgctttccgtaccgggccaacggcagtgaagatcgtaatgtgcggccagttcaaaaccgaagcggctatataacgccggatcgcccagcgtcacgaccgccgcgtagccgaactcgttgagcgaatccagcccttcatacactaactggcgcgccagcccttgcccgcgatacttttcatcgaccgccagcggcgccatgccgacccactgtaaatcttcgccctgcacatcaaccgggctaaaggcgacatagcccaccacctgaccttcatcatccgtggccaccagtccgagcgtcagaaaaccatcttcacgcaaatcgtgaaccagcttcgcttccgcatcgctttcgaatgaacggcgtaacagcgcatcaataccaggcgcatcaataggaatttctactcgaattagcatggttcacctaccgaggtctgtttggtttccggcgagtttttcattcccgcctcaacaaaatccgccagttgcagcagcataacgcgtaacgctttcggcatctgctccagttcgatggcgtccatcagattcttcacatacaaccctaactcagtatcgccttcaatgaccagtcgacgctggaaaaagagcgtatccggatcctgtttacgggcggcgatcattagcagatcgctggcgtcggcgctaaaactgacgtcagcatccgcctgctggctaacgatcagcttttcattttcaaccgtggtataccattttaagtcgatgtcacgaacatgaatgcttaaccaacgaccttcgaggaattccagctctccatcggccagcgcctgacgaaactgccagctcagaacctgttccagaacctggcgctttagcgcaaagggcgtcagtttaaccggtacactcatcagagacgggccagcatggactaagcgtgaacgcagtttatctaacacgagctttactccctgtttcaatagtcctgttattttgccatatccaataaatcacatggcggcgtaaatcaacaattgggtctgattttctaccccattattggtgttaccaatacgcctttaactgccttaaatcaaaaattgtcgcagcaaggttaactaaaatccctgttcgttaacaattttgcgtctcagacgtaaccctcaggataaattatggagctgctctgccctgccggaaatctcccggcgctgaaggcggccatcgaaaacggcgctgacgccgtttatatcgggttaaaagacgataccaatgcccgtcattttgccggccttaactttaccgaaaaaaaattgcaggaagcggtgagttttgttcaccagcatcgccgcaaattacacatcgccattaatacttttgcgcatccggacggctatgcccgctggcagcgcgccgtggatatggcggcgcagcttggcgccgacgcgttgattctcgccgacctcgctatgctggaatatgccgcagagcgttacccgcatattgagcgccatgtttccgttcaggcctcggcaaccaacgaagaggcgattcgcttttatcaccgcaactttgatgtccaccgtgtagtactgccgcgtgtactgtcgattcaccaggtaaaacaactagcccgcgtcacgccggtgccgctggaggtattcgcgtttggcagcctgtgcattatggcggaaggtcgctgctatctttcttcctacctgacgggggagtcgcccaataccgtcggcgcctgctcgcccgcccgctttgtccgttggcagcaaacgccgcaggggctggaatcgcgcctgaatgatgtcctgattgaccgttaccaggatggcgaaaacgcgggctacccaacgctgtgcaaaggccgctatttagtggacggcgagcgctatcacgcgctggaggagccaaccagcctgaacacgctggaactgctgccggagctcatggcggcgaacatcgcttcggtgaagatcgaaggccgccagcgcagcccggcctatgtcagccaggtggcgaaagtgtggcgccaggcgatcgatcgctgcaaagccgccccgcaaaacttcgttccacagcgcgactggatggagacgctcggcgcgatgtccgaaggcacccaaaccacgcttggcgcatatcaccgtaaatggcagtgagaggagctatgaaatattccttaggaccggtgctttattactggccgaaagagacgctggaagatttttatcagcaggccgcaaaaagcagcgctgatgtcatttatctgggcgaagcggtgtgcagcaagcgtcgcgcgaccaaagtcggcgactggctggaaatggcgaaatccctcgccgccagcggtaagcaggtggtgctctccaccctggcgctggtacaggcgtcatctgaattaagcgagctgaaacgctatgtggacaacggcgattttctgctggaagccagcgatcttggcgtggtgaatctgtgcgccgagcgcaaactgccgtttgtcgccggccatgcgctgaactgctacaacgcggtcacgctgcgccggttgctgaaagaaggcatggtacgctggtgtatgccggtggagctgtcccgcgactggctggtgaatttgcttaatcagtgcgatgaactgggcatccgcaatcagtttgaagtggaagtgttgagctacgggcatctgccgctggcctactccgctcgctgctttaccgcccgttcggaagaccgcccgaaagatgagtgcgaaacctgctgtatcaagtatccaaacggtcgtgacgtgctctcgcaagagaatcagcaggtgtttgtgcttaacggtattcagaccatgagcggctatgtctataaccttggcaacgaactgacgtcgatgcagggattggtcgatatcgtgcggctgtcgccgttggggacggagacatttgccatgcttgatgcctttcgcgctaacgaaaacggcggcgcgccattaccgcttgccgcgcatagcgactgtaacggctactggaagcggctggcaggtctggagctacaggcctagccggatggcggcataaataccttgtccggcctacaaatagcgatcccgtaggcccgataagcgcagcgccatcgggcattgtttttgccgtcagtctcataaagctcactttgttaacaacattcgctaatctttaatgcagtattaaaagattaaccggtaacaaagtgagccgttatgactgacaaaactattccgttctcggtgctggatctggcgccgatccctgaaggatcttcggcaaaagaagccttcacgcactcgctggatctcgcacggctggctgaaaagcgcggttatcaccgctactggctggcagaacatcacaacatgaccggtatcgccagcgcggcgacctcggtattgattggttatctggcagccaataccacaacattacatcttggctccggcggcgtgatgctgcctaaccattcaccgctggtgattgccgagcagttcggcacgctgaatacgctctacccgggacgtatcgacttagggttgggacgcgcgccgggtagcgatcagtcgacgatgcgcgcgctgcgtcgccatatgagcggcgatatcgataactttccacgcgatgtcgcagagctggtggactggttcgacgctcgcgaccctaatccgcatgtgcgcccggtgcccggctacggcgagcagatcccggtctggctgttgggatccagcctgtatagtgcgcaactggcggcccagcttggcctgccgttcgcctttgcttcgcatttcgcgccggatatgttgttccaggcgctgcatctgtaccgtacccagttcaaaccttcagcgcggctggaaaaaccgtacgcgatggtgtgtatcaatattatcgccgccgacagcaaccgcgacgccgaattcctgtttacctccatgcagcaggctttcgtgaagctacgccgtggggaaaccggccaactgccgccgccgattgagaatatggagaccttccggtcgccatccgagcagtatggcgtgcagcaggcgctgagtatgtcgctggtcggtgataaagcgaaagtccgccacgggctggaatccatcctgcgggagacccaggcggatgaaattatggtaaacgggcagattttcgaccaccaggcacgcctgcattcgtttgatttagcgatggatgttaaggaagagttgttgggctgattttataacgccgattttcaacggtgatggttggcaatcggcgatttttttcgaagtaatcatagccgggcttcaacatacgccagaaattatattccggccatgcttgcgcctggcgcatattttcgtcattcatcgtaaatgggaagatatggacaggcacgctcttctgcccgctgtttagcgcctgcgccaccagttgataaatctcttcaataccggcatcggtcatggcatagcaaccggccgaaacgcagttcccgtgaaccataatgaaatcaccggtgtagccatttgcccgatcgtaagcattcgggtagccaatattaaatgccagatgatagcggctgtttgggttaagcaaccctttgttggtggcataaaagccttccgggcttttaccgtctccctgtttatgttttggccctaagccaccagaccatgcgcatatagtccaggttttgtagagtttgtaaggcttgttattggcgcttgcccacagttccagcttatcttccgctttcagaatgcggataaataactggtcgccggggtgaatgatttttaaagacgatgcgacaggtttttccactggcaggtaaacgtcttcatcgtacggagtgagccagaaaaattttaaaataaaagcgataaacaggctcaataatacaatagcgagtagtcctttacgccccattttcgtattccgcttattctgaaccagttcaagtatatattttcctatgatatgaaatagaggaaaggtccagttctgtacttttataaaatagtaatcgttttatcatggccgaacagggatatgaataaatcgacttattaccagagaaaatcatcatgagtgaacctgcttccttttttcttcatgcacatattaccgagagtaacctcaagaaatttttccattcaccggcaacaaatattaaagactatgacgactggttgccatggtttactgaggagcaaaggttgtacggcgatcctgcaaaaatgcttaacaatcttgccacatgtaattctggtgaaagtgaaaagaatatttatgctgaacatatcaactttaataaagaaacacagatagtcacgatggatcacatatttctctcagagagctatgaaatcttcatgccactcatggcctgtgtgcggggaatcgagaaatttattacgccaggggaaaataattttgcgctaatttattattactggtggggttcggagatcgccatcgcgctcgaatttgacgccaatggtagcagaataacggcaaatcctaaggcagaaaatttaactatcgccgatgcttttttcgatgaacacggggaagcactcgccgaagaactttataataaacagggttttatttgataccatttcgcggacttgtgaaatattgccggatgaaaacagctcatccggctcgttcaattactggtacaccggcaacaaattaaagctcgataaaatatgcaccagtgcgttcccgacgccaaatagcagaatcagtacaatcatcggtttaccgccccagacgcggaatttcgggctgccgaaacgttcgcgagatttacgtgccaacagcgcaggcacaatggccgcccagatagttgcagctaaacctgcatagccaatggcgtacagaaaaccgttcgggtacagcaggccaccaatcatcggcggcaggaaagtcagcagcgccgttttaaaacgtcccattgccgagtcatcaaaaccaaacagatccgccagatagtcaaacagccccagcgtcacgccaaggaaggaactggcgaccgcaaagttagagaacaccaccagcagcagatccaggctgcggctgttcagcacgccgctcaacgcctgtaccagcacatcaatattgccgcctttctgcgcaatgccgataaattccggacgcgggatgttgcccatcgtccccagcagccagacggaatagagcgctagtgccagtaacgtcccataaatcaggcatttgacgatggtacgcggatctttgccgtaatatttcatcaagctcggtacgttaccgtgataaccaaaagaggccagacaaaatggcagcgtcatcagcaggtacggcgtatatgacgcgtggctttcagccacgttaaacaacgtggcaggctgaacgtgccccaacaggctgccgaaggtcaggaagaaagtaatcactttcgcgcccagcacaatcgccgtcatccggctgaccgccttcgtactcagccacacgacaaacgccaccagcagcgcaaaggcaaaacctgccgctcgcgccggaacgttcagcgacatctcagcaaaggtatgatgcagaattgagccgctcgccgagatataggcgtaagtcaggatgtagagcacaaaggcaatagaaatgccgttgaccacgttccagcctttccccaacagatctttggtgatggtgtcgaaactcgaaccaatgcggtagttaaggttggcttcgagaatcatcagcccggagtgcagcatacaaaaccaggtaaagaccagcgccgccatcgaccagaagaaccacgccccggacatgaccaccggcagggagaacatccccgcgccaatgatggtgccgccgataatcaccacgccgccaagcagcgaaggtgacgtttgggtggtggtaagtgttgccattcagctctctctccagtcatttatagtgtgactatctctcaatacgctgcactgtaccagtacacgagtacaaaagaaataaaaaaagccccgattgtgacgatcggggctgtatattttactttacgctgtgaatgcgcaggtcagcgtgagttacgcatcaccgccgaaacgacggcgaccggtagagtcatcacgacgcggaccacggctttcacgacgttcgccgctgaagcgacgaccatcaccacgaccaccttcacgacgttcgccgctgaaattacgaccgccttcacgacgttcgccactgaagctacgaccaccgccgcgacgttcgccgcccgcgtgcggaaccgcatcacccaacagctgcatattcatcggcttgttcagaatgcgggtacgcgtgaagtgctggagcacttcgcccggcatacctttcggcagctcgatggtggagtgagacgcgaacagcttaatgttgccaatgtaacggctgctgatgtcgccttcgttagcgatagcgcccacgatatgacgaacttcaacgccgtcatcacggcccacttcaatgcggtataactgcatatcgccaacgtcacgacgttcacgacgcggacgttcttcacgatcgccacgcgggccacggtcattacgatcgcgcggaccacggtcgtcacggtcacggaattcacgcttaggacgcatcggcgcatccggcggcaggatcagcggacgctcgccctgcgccattttcagcagtgcggcggccagcgtttcgagatccagctcttcaccttcggcagacggctggattttcgccagcagcgcacggtactgatccagatcgctgctttccagttgctgctgaactttcgcggcgaatttttccagacggcgtttacccagcagttctgcgttcggcagttccacttccggaatggtcagcttcatggtgcgttcgatgttgcgcagcagacgacgctcgcggttctcaacgaacagcagcgcgcgaccggcgcgacccgcacggccggtacgaccgatacggtgaacgtaggactcggagtccatcggaatatcgtagttcaccaccaggctgatacgttcaacgtccagaccacgtgccgcaacgtcggtagcgatcaggatgtccagacgaccatctttcaggcgttccagagtctgctcacgcagcgcctggttcatatcgccattcaacgcggcgctgttgtagccgctacgttccagcgcttctgctacttccagggtcgcgtttttggtacgcacgaagataatcgccgcatcaaagtcttccgcttccaggaaacgcaccagcgcttcgtttttacgcatgccccagacagtccagtagctctggctgatgtcaggacgggtagtcacgctggactgaatgcgcacttcctgcggctctttcataaagcggcgggtaatgcgacgaatcgcttccggcatggtggcggagaacagagcggtctgatgaccttccgggatctgcgccataatagtttcaacgtcttcgatgaagcccatacgcagcatttcgtcggcttcatccagcaccagaccactcagtttagagaggtcgagggtgccgcgttttaagtgatcaagcagacgtcccggcgtaccgacaacgatctgcggcccctgacgcagggcgcgtaactgcacgtcataacgctgaccgccgtacaaggcaaccacgtttacgccgcgcatgtgtttagagaaatccgtcatggcttcggcaacctgtaccgccagttcgcgggttggcgccagcaccagaatctgaggtgccttcagctcaggatcaagattgttgagcagcggtaaagagaacgctgcggttttgccgctaccggtctgggccatgcccagcacgtcgcgaccgcccagcagatgcggaatgcactctgcctggattggagatggtttttcgtaacccagatcggtaagggcttcaaggataggagccttcagccccagatctgcaaaagtggtttcgaattcagccatgtagtacgtgtgcctcaaaattaatggcggccagtctacataactcatcatgaaattgatctgcaattttcattgaaaagtgtgaaccggctcaaagtaggtgtattaacgaacaacaacgccctcacccgcgaaggtgatggcaatcaaaaagattacgggctgatatgttcgtcagctattgctggtccgattctgccaggtcatcttggtcctggcccaggagcgataattccaacaatgcgtatcggtgctcaacaaagttatgaacgttgttggccaccgccagtttgaacagagccgtggcgctgtccaaatcccccagacttaggtaatacttacctaaatagaagttggtttcactgagatgctcagcgagcgaggtgttatccgttgcgtccgccttgagcctttccatcagcgttgcttcgctaatgtcgcccaggtagaactcgacaatgttccatccccattgctctttatccgatttttcgaagcgtgcttttaacgcttctttcgcctgcttctcattaagcttctgctcaacaagatacagccacaggctgcggtaaggatcattgggatcgtcttgataaaacgccagcagatcatcttgcgctaacttatcacggccgccgtaatacaatgcgataccgcggtttaagtgcgcgtagttgtaagttggatcaagctctagtacagaatcaaacgcttcataggcagcatcaaaattgcctgcctgcgttaaataaatgcctaagtaattgaatacttcaggcatatccggtctgattgccagcgcttgtgaaaaatcatttcgcgctaatgccctcaaaccaagactatcatacaacactccgcgctcatataaaagctgtgcgcgttcgtcatcggttaaagcccgactggcaagaatctgttccatacgcgccagaatcacttcctgctgtaaagtcggttgcaatggtactgcgaggacttcacttttacgccaggcggaattactgcatcctgcaagcgtaagtgctgtcgcaacgaaacaccagcgcaaaaaaggcttcatttcccactcccgaagacaacgattgaatgaacgtcctgttccccggtggctcaacaaggcgtccagccaggtctaaagccctccgcactgcggagggcaaaaggctaccttactcggcctgttcgctcgccggagcttccggcgcagccgcaggttgagactgctcggttgcttctttaatgctcagacgtacacggccctggcggtcaacttccagaaccttaaccgggacttcctgacccatctgcagatagtcggtcactttctctacacgtttatccgcgatttgagagatgtgaaccagaccttctttcccgccgccgatggcaacaaacgcgccaaagtcaacgatacgggtcactttaccattgtagatacggccgacttcgatctctgcggtgatctcttcgatacgacggatagcgtatttcgctttttcaccgtcggtcgccgcgatcttcacagtaccgtcatcttcgatttcgatggtggtgccggtctcttcagtcagcgcgcggatcacagaaccgcctttaccgatcacgtctttgatcttgtccgtgctgatcttgatggtatggatacgcggcgcaaattcagagatatcgccgcgcggcgcgttgatcgcctgttccatcacgcccaggatgtgcagacgcgcacctttagcctggttcaacgcaacctgcatgatctctttggtgataccttcaattttgatatccatctgcagcgcagagataccgtcgcgggaacccgccactttgaagtccatatcgcccaggtgatcttcgtcgcccagaatgtcagacagtacaacgtagttgtcgccttctttcaccagacccatagcgatacctgctacggcggctttaattggcacgccagcgtccatcagcgccagagaagcgccgcacacggaagccatagaagaagaaccgttggattcggtgatttcagacaccacgcgaacggtgtacgggaatttatccatgtccggcatcactgccagcacgccgcgcttcgccagacgaccgtgaccaatttcacgacgcttcggagaaccgaccatgccggtttcgcctacggagtacggagggaagttgtagtggaacaggaagctgtcagtacgctcgcccatcagttcatcaagcacctgcgcgtcacgggcagtacccagagttgcggtaaccagcgcctgcgtttcaccacgggtaaacagagcggaaccgtgagtacgcggcagtacgccagtgcgcacgtccagaccacggatcatgtctttttcacggccatcaatacgcggctcgcctgccagtacgcggctacgcaccacgtttttctcgatagcgtgcaggatttcgcccagctcgttagcatccagagtttcatcttctgcaataagctgctcgatggtttcggatttgattacgtcaacctgagcatagcgctcttgtttatcggtgatgcggtacgcgtcgctcagacgagattcagccagcgcagcaacacgcgcgttcaacgcgtcgttgacggcttccggctgccagtcccaacgcggtttaccggcttctttcaccagatcgttgatcgcctggataacaacctgctgctgctcgtgaccgaataccaccgcgcccagcatagtgtcttcgctcagcagttcagcttcggattccaccatcagcacagccgcttcggtaccggcaaccaccaggtccagcttgctttctttcagctcgtcctgggtcgggttcagcacgtactggtcattgatgtaacctacgcgcgccgcgccgattgggccgttgaacggaatgccggacagcgacagcgcagcggatgcgccgatcatcgccacgatatccgggttaacctgcgggttaacggaaacgacggtcgcgataacctgcacttcgttaacgaagccttccgggaacagcggacgaaccgggcggtcaatcagacgcgcgatcagggtttcgccttcgcttggacggccttcacgacggaagaagctgcccgggatacgaccagcagcgtaggtacgctcctgatagttaacggtcagtgggaagaagtcctggcctggcttggcttttttctggccgacaacggtaacgaatacggcggtgtcatccatgcttaccataacagcggcagtggcctgacgcgccatcatgccagtttccagcgtaacggtatgctgaccgtactggaatttacgaacgatcggattaagcaaaataatatcctttccaatttttgacggcataatacgcgccgtcgttaatacccgatcttctgcgcatcctcgcgactaatgacaaccctaaccctgatatgggtaaagcctctcattagccgcgcgaacctctgcaacggaagatcattcatagcaacaatacattagtttccagcgaattgctgccatctgctggaaaaaaggggccatgaaggccccctctttctgaaactcgaaagaattagcgacgcagacccagacgctcaatcagcgcggtgtagcgtgcaacatctttacgtttcaggtagtcgagcagtttacgacgctgagaaaccatacgcagcagaccacgacggctgtggtgatcttttttatgctctgcaaagtgaccctgcaggtggttaatctgtgcagtcaacagagcaacctgaacatcggtagaaccggtgtcgtttgcgtcacgaccgaactcagaaacgattttagctgtagcttcagtacttagagacattttaaaactccaaagtatttaagaatgagaggacgccgatctctaattcagcgatcccagtgtacgccgcgtaaactgttaaataatttacgcgacgttaagcggcggtattctactcgcagcgctctcttatcgcaagacgaagcgacattacgctgggtactctactaccagccgacgaggcgcgacacggccttcgtcgtcaatttcgcccataccgataaatttatcgtcttcaccttccgtcacacgaaccagtcccttcaacggcgcgcccgtggtacgaaccgggttgccatttttgaagtataccgaagatgttaacggcagattaacaacaggatagtccgaagctggactgtccattggcatcaataatggatcgagcaactgcgccgccggaacgccctgctgttccgcctgtgctaccagcgtctgcaaatgctccagcgtcaccatacgatccaccggatacttgctgaccgtcagacgacgcaggtacgttacgtgcgcgccacagcccagtttctcacctaaatcatcaataatggtacgaatataggtgcctttggagcaatgaacttccagctccagctcgttaccttcatggcgaataaacagcagctcatagacggtaatcgggcgggcttcgcgcggcacttcgataccctggcgggcatattcgtacagtttcttaccctgatacttcagcgccgaatacattgacggaatctgctcaatatcgccgcggaaagtctccagcgcgctcgcaagctgctcagcgctgaaagtcaccggacgctcctgcacgatttgaccatcggcgtcagaggtatccgtgcgctgccccagacgggcaataacacgatagcgtttgtcagaatccagcaggtactgcgaaaattttgtcgcttcgccgaggcaaatcggcaacatgccggtcgccagcgggtccagcgcgccggtatgcccggcgcggttggcattgtagatgcgcttaactttctgcagcacgtcattgctggacataccctgcggcttatccagcagcagaacgccgtgaatgtcgcggccacgacgacgaggacgactcatcagtcctccttgctgtcgtccgggttcacacgacgttcttcgtcatgtttcaccacgttagttaccaggttggacatacgcatcccttccaccagcgagttgtcgtagaagaaggtcagttccggcacgatgcgcagacgcatcgctttacccagcaagctgcggatgaaaccagacgcttcctgcaacgctttgatgcccgcttttactgcgtcttcatctttgtcgttcaaaaaggtgacaaacactttggcataggccaggtcacgggacatttcgacaccggagacggtagtcatcatgcccaggcgcgggtctttaatttcgcgctgcaggatgattgcgatctctttttgcatctcttgcgctacgcgctgagggcgaccaaattctttcgccataataaattctccagaataaagacaaaaaaggggccataagcccctttttaaatttcttgccgggtggcgcttcgcttacccggcctacgcctaatcatcttctaaggattttggattgcaacaaggcggcaagctcgtaaatccccgggagcatagataactatgtgaccggggtgagcgagcgcagccaacgccgttgcggcccaaaagacgacgaagattaagcgatggtacgttggatctcgataatttcgaatacttcaatcatatcgccaacgcgaacgtcgttgtagttcttcacgccgataccacattccatgccgttacggacttcgttaacgtcatctttgaagcggcgcagggattccagctcgccttcatagataaccacgttgtcgcgcagtacgcggattgggttatggcgtttaatcgtaccttcggtaaccatacagcccgcgatcgcgccgaatttcggcgatttgaacacatcgcgcacttcagccagaccgataatctgctgtttcagttccggagacagcataccgctcatcgccgctttcacttcgtcgatcaggttatagatgacggagtagtaacgcagatccaggctttcagattcgatcactttacgcgcagaggcatcggcacgaacgttgaagccaaccagaatggcgttggacgccgcagccagggtcgcgtcggtttcggtgataccacctacgccagaaccgatgatcttcactttcacttcgtcggtagacagtttcagcaaagagtcggagatcgcttccacagaaccctgtacgtcggccttcagcacgatgttcacttcgtgaacttcgccttcggtcatgttggcgaacatgttctcaagtttagatttctgctgacgcgccagtttaacttcacggaatttaccctgacgatacagagcaacttcacgcgctttcttctcgtcgcgaacgacggtcacttcgtcacccgcagccggaacgccggacaggccgaggatttccaccggaatggacggccccgcttccagcacttcctgacccagttcgttacgcatcgcacgcacgcggccgtattcgaagccacacagcacgatatcgcccttatgcagcgtaccttcgcgtaccagaacggtagccaccggaccacgacctttatccaggaaggattcgatcaccgcaccgctcgccatacctttacgaacggctttcagttccagaacttcggcctgcagcaggatagcgtccagcagttcgtcgataccggtgcccgctttcgcagacacgtgaacgaactggctctcgccgccccactcttccggcagaatgccgtactgggacagttcgttcttaacgcgatccggatcggcttccggcttatcgattttgttcaccgcaaccacgaccggcacacctgccgctttcgcgtgctggatagcttcgatagtctgcggcatcacgccatcgtctgccgctaccaccagaaccacgatatccgttgcctgggcgccgcgagcacgcatcgaggtaaacgcggcgtgacccggggtgtccaggaaggtgatcatcccgttgtcagtttcaacgtggtaagcaccgatgtgctgggtaatgccgcccgcttcgccagaggccactttcgtggaacgaatgtagtccagcagagaggttttaccgtggtcaacgtgacccatgatggtcacaaccggggcgcgcggttcagccgcagcgccggtatcacggtcgctcattaccgcttcttccagttcgttttcacgacgcaggataactttgtggcccatctcttcggcaaccagttgtgcggtttcctggtcgataacctggttgatggtggccatagcacccagcttcatcatcgctttgatgacctgagagcctttaaccgccatcttgttcgccagttcgccaacggtgatggtttcaccgatcaccacgtcgcggttaacggcctgagcgggcttctggaagccttgctgtaaagaagaccctttacgcttgccgcctttaccgccgcgaaccgcagcacgcgcttcttcgcgatcggctttggattcggcatgtttgccttttttcgccggacgcgctgcttttgcattacggccacgaccacgaccgccttctacttcacgatcgttttcgtcttcggcctggcgagcgtgctgagaagtggtgacatgatagtcactggtgtcttctactggctcaggcgttgcggtccatttgttttcttccgccatgcggcgagcttcttctgctacacgacgcgcttcttcttcgagtttgcgacgtgcttcttcttccgctttacgcttcagctctgcagcttcattctcacggcgggctttttcggcctgggcggttttggtcatatcgtcagtctgttgattgctcactttgtctttttccgcagcttcacgtttcgctttttcagcggcttcacgcttagcttgttctgcggcctcgcgttcagctttttgttgcgcctcgcgtttggcctgttcttctgcctcacgacgggcttgctcttccgcttcacgctgcgcctgctcttccgcggccaggcgttcagcctcttgcggatcgcgtttcacaaaggtgcgcttcttgcggacttcgatttgtaccgatttactttttccaccggtaccaggaatattcagggtgctgcgcgttttacgctgcagcgtcagtttatcgggaccagaaaccgcttcgcggttcaggtgcgccagtaaagtctgtttttcttgtgcggacacagagtcgtcagcagatttccggatacctgcatcagcaaactgctgtaccaggcgatccacggaaacctgtctctctgcggccagcgcttttagggttacatctgtcatgctgttccttcctgctacagtttattacgcttcgtcgccgaaccagcaaatattacgggcagccataatcagctcaccggctttttcgtcggtcaacccttcgatatcagccagatcatcaatgccctggtcggcgagatcttccagcgtacaaacaccacgagccgccagtttgaaagccatatcgcgatctaatccttccagattcagcagatcgtcagccggtttgttatcaccgaggcttgcttcctggtcctgcgccagagtggccagtgcgtttttagcacgctcgcgcagtgcttcaacggtcggctcatcaaggccgtcaatttccagcagttctttcattggcacataggccagttcctcgagcgtggagaaaccttcttctaccagaacggtcgcgaactcttcatcaatatcaagatatttagtaaaaatctcgatagcggcatgtgcttcagcctgatgtttagcctgcaagtcatcaacggtcattacgttgagttcccagccgctcaattgcgaagccaggcggacgttctgaccattacgtccgatcgcctgcgccagattaccggcttcaacggcgatatccatggtatgtttatcttcgtccaccacgatagacgcgacgtctgccggcgccatcgcattaatgacgaactgcgccgggttatcatcccacagcacgatatcaatacgctcaccgcccagttcggtagagaccgcctgaacgcgcgcgccgcgcatccccacgcaagcgccgaccggatcgatacgtttatcgttggttttcactgcgattttcgcacgagaacccggatcgcgagccgccgctttaatttcaatcacttcttcgccgatttccggcacttcgatgcggaacagttcgatcagcatttccggcttggaacgggtgacgaacagctgcgcgccacgcgcttccggtcgaacagcatacagcacgccgcgaatacggtcgccagggcggaagttttcgcgcggcagcatatcttcacgcagaatcaccgcttcagcgttaccggccatcccttcggatttaatttccagagagatattgtcgcggttcactttcttcaccacgccagtgacaatttcgccttcctggtcgcggaactgatcgacaaccatcgcccgttcagcttcacggaccttctgcacgataacctgtttcgcagtctgcgtggtgatacggtcaaaggtgacagattcaatctgatcttcaacatagtcgccgacattcaggctttcgtcttcaaaacgcgccgcttccagcgtaatttccttcgtcggcatggtcacttcttcaacgatcaaccaacggcggaaagtatcaaaatcaccgcttttacgatcgatttctacacgaacatcgatctcctgctcatattttttctttgttgctgtcgccagcgcactttccagcgcttcaaaaattttttcgcgtggcagcgctttttcgttggagacggcttcaacaacagccaaaatttctttgttcatcgcgggcttttcacctcatccagactgttaaaagtggggaaccaggttcgccttctggatattactcagcgcgaacacttcatctttgccttcgactgtgacggtaatcatttcaccgtccaccgctttgataatgccctgccacttgcgacggttctgtaccgccatgcgaagaaccagcgcgacttcttcaccctggaaacgcgcataatgatcggcagtgaacataggacggtcgagacccggtgacgagacttcaaggttgtaagccacggagataggatcttcaacgtccagcaccgcgcttacctggtggctcacatcagcacaatcatcaacattgatgccatcttcactatcaatatagatgcgcagtgtggatgtgcgaccgcgaataaattcgatgccgaccagctcgtagcctaaggcttcaactggcgctgtaatcatctctgttaatttttgctctaatgtggacaagcccacccccaagacataaaaaaagggcctaaagcccagttattctgtagtcagataacaaaaaaccccgataaatcggggctttagataactgaaccctataaccgcaacggcggtctggtgtaccttccgaaagaatttttttcaaatccagctacgaaggacataatcttcacagtatatttgaaaaagaactctaagggaaagtggttgcgggggccggatttgaaccgacgaccttcgggttatgagcccgacgagctaccaggctgctccaccccgcgcctgaaacgtggcaaattctactcgttttgggcaaaatttgcaaatactgctgggatttggtaccgaggacgggacgtaaaatctgcgcacagtatagtgacctggcatgagttatgtcaaccctattcccaatatgcagatgaatgaatatcactcttcgttatactcatcccacctctccggcttatacacgcatgtcacaacgttatttcagtaaaccttcactaaacgcttcctgtctctgctaaaagatgattaaatgaaaactcatttattttgcataaaaatgcactaaagcagaaaccgatctcattatcagtcaatcaagcagggttctattctatgacgacgattcttaagcatcttccagcaggtcaacgtattggtatcgctttttccggcggtctggacaccagcgccgcgctgctgtggatgcgacaaaaaggagctgtcccatatgcctatactgcgaatctgggacaaccggatgaggatgactatgacgccattcctcgtcgcgcaatggagtatggcgcagagaatgctcgcctgattgattgccgcaagcagttggttgcagaagggatcgcagcgattcagtgcggcgctttccataatacgactggcggactgacctatttcaataccacgccgctgggccgtgccgtaaccggcacgatgctggtcgccgcgatgaaagaagacggcgtgaatatctggggcgacggcagtacctataaaggcaacgatattgaacgtttctatcgttacggcctgctgacgaatgctgaattacagatttacaaaccgtggctggataccgactttatcgatgagctgggtggtcgccatgagatgtctgaatttatgattgcctgcggtttcgactataagatgtcagtcgaaaaagcctactccaccgactccaacatgctcggcgccacgcatgaagcgaaagatctggagtttcttaactccagcgtcaagatcgtcaacccgattatgggcgtgaagttctgggacgagagcgtgaagatcccggcagaagttgtgaccgtccgcttcgagcagggtcaccctgttgccctgaacggtaaaaccttcagcgatgatgttgagatgatgctggaagcgaaccgcatcggcggccgtcacggcctgggtatgagcgaccaaattgaaaaccgcatcattgaagcaaaaagccgcggtatttatgaagcccctgggatggcgctgctgcacatcgcttacgagcgtctgttgaccggtattcacaacgaagacaccattgaacagtatcattctcatggtcgtcagctgggtaaactgctgtatcagggccgctggttcgactcgcaggcgttgatgctgcgtgacggcctgcaacgttgggtcgccagccagattaccggtgaagtgacgctggaactgcgtcgcggcaacgactactccatcctgaacaccgtgtcagacaacctgacctataaggctgagcgtctgaccatggagaaaggcgagtccgtattctcaccggacgatcgtattggccagttgaccatgcgtaatctggacattaccgatacccgcgagaaactgttcggctacgcgaaagcgggtctgttaaccgcctcttccgcgaccggtctgccgcaggttgagaatctggaaaacaaaggcaaataagcccgcgtcgttgatgcaacaggccgcgaaagcggccttttttgtgaatatcaccccaggttgatgcaaatggcggatttgccggttaatctaactggacaacatttcgcaccctgtcaaagcattgtgcagccatgtctttttcagtcatcattatatagtcaatgcccccgccaaaatccggcccagcgacagccagtaatgctgttgtagaatgaatttcttcatcccagctaaaaagctgtcgccaccttgtatcattttgattcagttcatcttccacactacgttggagaggaattgtccaccctcccagaagatcgccggaatagcaggcatcaactcgatacgggttgtcctgttcgtaatcacttaacgcgtcataccatgattcatacgctttctgctgcgtaacgcttaacccctcgcagactgacgaaacactgataacggaaagaggttccaggcactcaacctgtgtacacaattgccatggttcacgaaattcaatcttattgtaaaaagccagcaagtcatctggcacagctagcgtgcttaatgtatctacctcaacatcgtgccagaaaacaaagggctgccgatcttcccaggtaacatcgacaaagaagctcaataacccccgcctgggaagcagtggatcaaaccccgggagtaacgccaggtcactcaagtttagttgggcaacgaaagcaagcggaaaatcaaccaactgattctctatgcggatgtcaatttcggttaataaccgctgctgcactaaccgatacttttcctcgtcaaaatcttccgctggctgcccaagcagcttacgcccttcattgagcagctcataactcattttcatttcatgaacaaacctggcatttcgcgttttttcagctttcagctttagtacgcgagatgtggcattaaccgatttttttcgtataggccagctttgtcctaatggccagtcgggtagaccgcccaaccgcgatgcccccacctttactgtttccatatcccgcagacaacgtttaaatgcaatagcagcacgtgcctgttgcacgactttctcctgaatagcagagctcaaattggatgtgcgcaattcagcaatcaatccagcacgatcgaaaaataaactcattaatctcttccttagatattcggctcagtgcaaaggaagattagataaaactacttgagcaaaagatatggagggggataacagatacaagcatttcagattatagctgagcaactactggcttcaatgaacgaagatgatctcgtaatcggtggagtgaacctgacgcagggagatcaccagagaggacatacatgagtatgtatgtagggctatctcaacgtattgacggggccatgccagggacgcgtgtaagcgtgcttcaacctcctctctgagagcagtttcaacagacgaaaaaaaagacgcttttcagcgtctttctttcggaatattggtaccgaggacgggacttgaacccgtaagccctattgggcactaccacctcaaggtagcgtgtctaccaattccaccacctcggcacggatactgctattagcgcgggatatcgctggtcggctgggccggtgcagcaggttgagtctgctcggtcttcgccggcgcactcagattttcccactcgcttcctttattggttttgttgctattgatattacccaacaccagactgatgatgaagaacagcgtcgccaataccgccgtcattcgggtcatgaagttaccagaaccacttgaaccaaatagcgtagcggaagcgcctgctccgaaggaggctcccatatcagcgcctttaccttgctgcagcatgatcagacctacaaggccaattgccacaataaggaaaacaactaaaagagcttcgtacataatcaacctgttccttgcggagttgccgcgtaccaatgcttctaccaataaagcgggatttttactgtttcccactgaagcgggtgtgaatactaaccaaagcgaatgaccttcgcaagggcaatttaagcgcattgtatcaactgcggaaaaaaacagcaaaagcgttgttttttgcgggccgtaaggcggcaaccgccgcctttttagtcacttaaacgcttaaacggcttttaccgcatccgcgatacgatgggcgaatgccgtaacctgcgcttcatcctcgccttccaccatcacgcgaatcagcggttcggtaccggatttacgtagcagtacccgcccacgattgccgagcgtggcttctacgtccgccgttaccgctttcaccgcttcattttccagcggatcgccgctaccggcggtgtaacgcacgttaaccagaatctgcgggaacattttcataccgctgcacagatcgtgcagactcatatgattacgcaccatcgccgccagaacttgtagccccgctacaataccgtcgccagtggtcgttttatccaacagaataacgtgaccagagttttccgcgccgatgcgccagcctttttcctgcaatttttccagcacgtagcggtcgcccactttcgcccgggcaaacggaatgccaagctgcttgagcgccagctccagccccatattgctcatcagcgttcccaccgcgccgccgcgcagctgcccctggcgcagcccttcgcgcgcgatgatatacatgatctgatcgccatcgactttattgccttcatggtcaaccatgatgacccggtcgccgtcgccgtcaagcgcgatgccgaggtccgccttctccgccaacacgcgcgcctgcaacgcgcgcacgtcggtcgcgcccacttcttcgttaatgttgacgccgtttggctcacagccgatggcgataacggtcgcgcccagctcgcgcagcacattcggcgcgatatggtaggtagcgccgttggcgcaatccacaaccactttcaggccattgaggctcagttcgttcgggaaggtgcctttacagaactcaatatagcgtccggcggcatcgacgatgcggctcgctttacccagctcagcggagtctacgcaggtgatctctttttccatttcggcttcgatggcttcttccacatcgtcaggcagtttcgtaccgtcgatagagaagaatttaatgccgttatcatagaacgggttatgcgaagccgagataacgatacccgcctccgcgcggaaagtccgcgtcagataggcgacggctggcgttggcataggtccggtaaacgaggccgacagtcccgcagcggcaaggcccgcctccagcgcggactccagcatatagccggaaatacgcgtatctttaccgataatgattttacgcgagccatgacgcgccagcacttttccggcagcccaacccagtttaagcacgaaatcaggtgtaatgggggcattgcctacacgtccgcgaatcccatcggtaccgaaatatttacgattactcatagcgtttgtttccctttgcagacagagtggcttccaccacccgcatcgcctctacggtttctttgacgtcatggacgcgaatgatctgcgcgccctgcatcgcggcaattaccgcgcacgcaaggctgccgttcagacggtctgatggtcccacgttaagtaactgaccaaccatcgttttacgtgacatgcccaccagcagcggcaggttaaaatgatgaaactcacccagtcgcgccagtaaggtataattgtgagagagatttttaccgaaaccgaatcctgggtcgagcaacaatttctcttttgcgatgccggccttctcacaacgtgctatttgctcaataaagtagcgattcacctcggcaaagacatcgtcatatttcggcgcctcctgcatggttttggggttgccctgcatgtgcataagactgaccggcaagccggtttccgctgccgcttccaacgcgccgggttcggagagtgaacggacatcattgataatatgcgcgcccgcccttgccgcttcacggatcacctcgggtttagaggtatccacagaaatccacacttcaaaacgttgcgcgattgcttccagtaccggaataacgcgatccagctcttcttccacgctcacttctgccgcgcctggtcgcgttgattccccccccacatcaataattgtcgccccggcattcaccattaaattcgcatgtttcaccgcctcaatcagcgtgttatgcgcgccgccgtcggagaacgaatccggcgttacgttcaggatccccataacatgcggatgagtgagatcgagcgtggcgccctgagcgaagagtttcatggtcaaaatccctgttttatttatggtgagttaaaaaaagaaaaaccccggggcaagccccagggtttcggtgagcgctaaacataatgttgtaaaacaaatgcttatttgtcgcccagctgctctgacatcgtgttgcccgggttcggcgtgcgtggttcatcaaccggacgcggcgcctgaggcgtaccattgctgtcagagttattggtgccgtttggatcttcccagcccgcaggcggacgcacttcacgacgcgccatcaggtcatcaatctgcggcgcatcgatggtttcatatttcatcaacgcatctttcatcgcgtgcagaatatccatattgtcagtcaggatctgacgagcgcgattgtagttacgttcaatcagcgctttcacttcctggtcgatgatacgcgcagtttcatcagacatatgtttcgcttttgcgacgctacggccgaggaatacttcgccctcttcttccgcatacagcaacggaccgagtttctccgagaagccccactgggtgaccatgttacgcgccaggttagtcgcgactttaatgtcgttcgacgcgccggtggaaacatgctcaacgccgtagataatctcttccgccagacgaccgccgtacagcgtgctgatttggctttccagcttctgacggctggcgctgatcgcgtcgccttcaggcaggaagaaggtcacgcccagcgcacgaccgcgcgggataatcgtcactttgtgcaccggatcgtgttccggcaccaggcgaccgataatcgcgtggcccgcttcgtggtacgcggtcgactctttctgcgcttccgtcatcaccatggagcgacgttcggcgcccatcatgattttgtctttcgctttctcgaactcaaccatcgacacaacgcgcttgttaccacgagctgcaaacagcgccgcttcgttgaccaggttcgccaggtccgcaccggagaagcccggcgtaccgcgcgcaatgatcgccgcatcaatatccgtcgctaacggtacgcgacgcatatgcaccttcagaatctgctcacgaccgcgcacatccggcaggcctaccaccacctgacggtcaaaacggcctggacgcagcagcgccgggtccagaacgtccggacggttagttgcggcgataacgatgataccttcgttaccttcgaagccgtccatctcaaccagcatctggttcaacgtctgctcacgttcatcgtgaccgccgcccagaccagcgccacgctggcgacctacggcgtcgatttcatcgatgaagataatgcacggcgccgctttcttggcctgttcgaacatgtcacgcacacgagacgcgccgacaccgacgaacatttccacaaagtcagaaccggaaatcgtaaagaatggcaccttcgcttcacccgcaatggcttttgccagcagggttttaccggtacccggcgggccgaccatcaggacacctttcggaattttaccgcccagcttctggaaacggctcggttcacgcaggtattcaaccagttccgccacttcttctttcgcttcgtcacaacccgcgacgtcagcaaacgtggttttgatctgatcttccgtcagcatacgcgccttgctcttaccgaacgacatggcgcctttgccaccgccgccctgcatctgacgcatgaagaagatccagacgccgatcagcaacagcatcgggaaccaggaaatgaagatagaagccagcaggcttggctcttcaggtggttcgccaacaaccttgacgtttttagtcagcaggttatcaagcagcttcggatcattaatcggaatgtaagtcgtgtaacggttactatctttcttggtaacgttgatctcacgtccgttgatacgcgcttcgcgaacctggtcctgattgacctcttgcaggaaggtagagtaatccaccttacggccattagactcgctgggcccaaagctctggaatactgacatcagcacaacggcaatgaccagccagagtattaggtttttcgccatgtcactcaagggattaacctcttattacaactgtgttaaaaacagcgtcaggatactctatatccagtttctttcaaaccttacgtctgaaatctgccggttatcactttcgcccggtcgctacaatgtacacttcacgcgaacgcgcacgcgaagagtccggcttacgaactttaaccttcgtaaacagggagcgaatttcccttagatactcatcgaaaccttcgccctggaacaccttcactacaaaacttccgcctggcgccagcacatcgcggcacatctctaacgccagctccaccagatacatggcgcgggggatatccaccgccggtgttccgctcatgtttggtgccatatccgacatgacaacttgtactttactgtcacccacgcgttccagtaacgctttcatgacaagttcatcacgaaaatcgccctgaagaaagtccacaccaacgataggatccataggtaaaagatcacaagcgatgatgcggcctttgccgccaatctgcgtgaccacatactgtgaccagcctcctggcgcagcgccgagatcgactaccgtcattcccggcttaaaaagtttgtcactttgctgtatttcatcaagtttaaaccaggcacgggagcgtagcccctttttctgcgcctgttgaacatatttatcgctaaagtgttcctgaagccagcggcttgagctggcagaacgctttttacctgtcatttaactttcccgtcggggcagttcatcgtagccaatggcgtaaatttctacacgcctatttggcgatataagggagatggcggtagaatgacccgttttcaatcccaacgtaagcaaaaatatacgatgaatctgagtactaaacaaaaacagcacctaaaaggtctggcacatccgctcaagcctgttgttatgcttggcaataatggtttgaccgaaggggtactggccgagattgaacaagcgttagagcaccatgaacttatcaaggtgaaaatcgcctcggaagatcgcgaaacaaaaaccttgatcgtggacgctatcgtgcgcgaaaccggcgcctgtaacgtacaggtcatcggtaaaacgctggtgctgtatcgcccaactaaagagcgtaaaatctcgctgccgcgttaaggatatcctaaagtcgaacacaaaatctgtgtaaaacgaggggttttccacgagcaggagagcaaaatgccacgctctctccgttgataaaaggccgctatgcggcctttttcctttctttacaatacaccaacaatttgcgtattgagtactgcttaaaggtattccactttaagcacttcgtattccacatcgccgccaggcgttttgatcaccacgacgtcatcctgctctttgccgatcaggccgcgagcgattggcgagtttaccgaaatgagattttgcttaaaatccgcctcatcgtcgccaacaatgcggtaggtctgctcttcgtcggtgtccaggttcagcaccgtgacggtagcgccgaaaatcacgcgaccattgttcggcattttagtgacatcaatcacctgcgcattcgacagttttgcttcgatatctttaatgcgcccttcgcagaaaccctgctgttcgcgtgcagcatgatactccgcgttttcttttaaatcgccatgttcgcgcgcttcggcgatagcggcgatgatttcaggacggcgcacagatttcagaaaatccagctcttcgcgcagtttttcggctccgcgtaaggtcatcggaatagcttgcatttgttatacctcttgaacattcctgtagggggcaatgaactctaccccggctgctaagccagccccggcatatgccataccagggtcagaagcaaaaaaacaccaacccgggcgcgcagtcccaggtcagctacaatttcctctttgataaccattttaccctggagttccctatgggtcatcgtttactttttagggcgttgcgccgtagtatgacggcttgtttccagggtgttagcgcgagattatgcgattttccagatttatcatcggattgaccaccagtatagcgttcagcgttcaggccgcgaatattgacgaatacatcaaacagcttccggccggcgccaacctcgcgctgatggtgcaaaagattggcgcgcccgcgccggctattgattatcatagtcagcagatggcgcttcccgccagtacccaaaaggtgattaccgcgctggcggcgctgattcaactcggcccggatttccgttttacgaccacgctggagactaaaggcaacgtcgataacggcatcctgaaaggtgacgtaattgcgcgcttcggtggcgatccaacgctaaaacgtcaggatattcgcaatatggtcgcgacgctgaaaaagtccggcgtcacgcaaatcgacggcaatgtgcttatcgacacgtcgattttcgccagccacgataaagcgccaggctggccgtggaacgacctgacgcagtgtttcagcgcgcctcccgccgccgccattgttgaccgcaactgtttttctgtgtcgctttatagcgcgcaaaaaccaaacgatttagcctttattcgcgtggcctcttattatccggtaacgatgttcagccaggtacggactctaccgcgcggttcggcagacgcgcagtattgcgagctggatgttgtgcctggcgatttgaaccgttatacgcttaccggctgtttaccacagcgcgccgacccgctgccgctggcctttgctattcaggacggcgccagctacgcgggcgcgatcctcaagcaggaactgaaagaggccgggataacttaccgcggcacgctgctgcgccagacgcaggttaacgagcccggaacgatcgtcgccagtaaacagtcggcgccactgcacgatctgcttaagattatgctgaaaaagtcagacaacatgatcgccgatactgtttttcggatgattggtcatgtcaggtttaacgtgcctggcacctggcgggcgggatcggatgccgttcgccagatcctgcgccaacaggcgggaattgatatcggcaataccattattgccgacggttccggtctttctcgccataatctgatcgctcccgccacgatgatgcaggtgctgcaatatatcgcccaacacgataacgagctgaactttatctctatgctgccgctggcgggctatgatggttcattacaataccgcgccgggctgcatcaggcgggcgtagacggtaaggtttcagcgaaaaccggatcactgcagggcgtgtataatctggcgggctttattaccaccgcaagcgggcaacggatggcatttgtacaatatttgtccggctacgcggttccacctgccgatcagcgtaatcgccgaatcccgctggtacgcttcgagagtcggttgtataaggatatttatcagaataactgagtgcatttattgccggatggcggcgctaacgcgtcttatctggcctacaaagaacataataaaacgggccgcaaatgcggcccgttggcttttgtaggccggataagcgtaagcgccatccggctacgagattaacgtttgtagatgaactcgacgccttcttcgtcgtcttcatcccagtcgtcatcccagtcatcgtctgcgtcttcttccacttcagccagctgctggcgatgataatcgtcccacatgaactcgactttttccggctgttttgcttcttcagcctgcgcgatcggattctcgatgataaaggtcatcacatcccagcagagatctttcacccccagctgactggcagcggaaatcagatagtatttcccttcccagcccaacgcttcggcgatcgctttcgctttctcttccgcttcggttttatccatcagatcgatcttgttgaacactaaccagcgcggtttagccgccagatcctggctgtatttttccagttcgccaataatgatacgggcgttttccaccggatcggaaccgtcgatcggatcgatatcaatgaggtgcagcagtacgcggcaacgttcgaggtgcttcaggaagcgaatccccaggcctgcgccttccgccgcgccttcgatcaaccccggaatgtcggccaccacaaaactcttttcgctgtccatacgtaccacgcccaggctcggcaccagcgtggtaaacggatagtccgcgactttcggttttgctgccgataccgcacgaatgaacgttgatttaccagcgtttggcatccccagcatcccgacatccgccagcagcatcagttccagcagcaggtcgcgcttatcgcccggcgtaccattggttttctggcgcggcgtacggttaaccgaggatttaaaacgggtattgcctaacccatgccagccgcccttcgcgaccaacagacgctgaccgtgtttggtcatgtcgcccatcgtttcaccggttccctggtcgataacgcgcgtaccgaccggcactttgatggtcacgtctttaccgcgtttaccggtacagtcgcggctcgcgccattctgaccacgttcagcgcggaacgatttttcaaagcggtaatcgatcagcgtattcaggttttcatcggcttccatccagacgtcgccgccgtcgccgccatcaccgccgtccgggccgcctttcgggatatatttttcgcggcggaagctcacacagccattaccgccatcgcctgcaacgaccagaatcgatgcttcatcaacaaacttcattttattctccgtaaatcattcgcctgagcggggttgcgaaaccaccgtttcatgcttgcgtaaaccgccccaaatacgatgaccaatggcggaatacatcgcgcccgcaaccacgacaaacgcaccgagataacctaaaaggtttaacatcggtctggcgaagaaatcgggccaggccatagataaaagatctgaaaacagcagggtaaatagcggtgtaagcgtgattatcgcgctcacctgcgccgcctgccaacgcgccatcgcttccgccagggcgccatatcctaccagcgtatttagcccgcagaaaatcaaacaggcgagctgccagtcgctcagttgcgctatcaccatcggttttgccagcggcaagagcgctatcgtacataaagtgtacagtaaaaacaggatctgctgcgagccagacgtcgcaataatactttttgcgccacgccatagctcacccacaccatcgccgcgcctacgccaaaaataacgccccaggtgtagtcggtcagtcgggtaaaaatctcgatcagactggtgttaaaaaacatcaccagcccgctcaataacatcagcgcgccaatcacctgcgtaccgcgcatcttttctttcagaataaagacgctggcgaccatcatgccaaccggcgagagctggccgataacctgcgacgcggttgggcttaaatattgcagggaagaactgaacaaaatgaaattaccgaacagtccgcaggtcgctatcgccaataacaccaaccagcgcggcttacgaaaaatacgcagcggcggcagctttctttttactgccagtatcgccccgaggccaatactggccattaagaagcggtagaagacaatggttgaaggctccatcacctccagcacttgcttcattgctattggcaacgctccccagcacatcgcggtagtgagcgctaaaagaatgccaatgcctgcctgctgcttcatgccgtgttccctgcaaagacccgttaacggcattcgcacagccacacgggtatattttagtcggccatcgaatgtaaaaagccccgcaacaggtgcggggctttcatccgttaccggaccacaaaaaacttactcagcaacgatgctgatgtatttacggtttttcgggcctttaacttcgaatttcactttaccgtctgctttagcaaacagagtgtggtcacgaccgcaaccaacgttggtgccagcgtggaatttagtaccacgttgacgaacgatgatgctgcctgccagaactgcttcaccgccaaagcgttttacgcccagacgtttagcttcagaatcgcgaccgttacgagtcgagccgccagcctttttatgtgccatttaatctgctcccctaatcttaagcgctgatgccggtaattttcacatcagtgaaccactgacgatggccctgctgcttacggtagtgtttacggcgacgaaacttaacgattttaactttctcgccacgaccgtgggcaacaacttcagctttgattacgccgccatcaacgaaaggaacgccgattttgacttcttcaccgtttgcgatcatcagaacttcagcgaactcgatagtttcgccagttgcgatgtccagcttttccaggcgaacggtctgaccttcgcttactcggtgttgtttaccaccactttggaaaaccgcgtacataaaaaactccgcttccgcgcacacctttcaatgattcagagcgcgctataaatattcacaatagggcgcgaatattacgcaaattgcacggctttgacaagtgctaccatcaatacatgaagaaaaaaaacacaacgcatacggtaacgtttatctgcggcgttttttcagtacaatcagggtatatttctaaccataaaccctacgttacctcattcagacatgggataatcggggcgataagcccggcttttgcgatgaatttagaaaaaatcaacgagttaaccgcgcaagatatggcgggtgtcaatgcgacaatccttgaacagcttaattccgacgttcaactgattaatcagctaggatattacattattagcggcggcggaaaacgcattcgtccgatgattgccgttcttgccgcgcgcgcggtgggttatcagggtaacgcgcacgtgactatcgccgctctgatcgagtttatccacacggcgacgctgctacatgatgatgtggtggatgaatccgatatgcgtcgcggcaaagcgacggcaaatgccgctttcggtaatgccgccagcgtgttggtcggcgactttatctatacccgcgccttccagatgatgaccagcctcggctcgttaaaagtgctggaagtgatgtcggaagcggtcaacgtgattgcagaaggcgaagtgctgcaattgatgaacgtgaatgacccggacattaccgaagaaaattacatgcgggtgatttacagtaaaacggcccgtctgttcgaagctgccgcccagtgctccggtattctcgctggttgtacgcctgagcaagagaaagggttgcaggactatggtcgctaccttggtacggctttccagctcattgacgatctgctggattacagtgccgacggcgagcatctcggtaaaaatgtgggtgatgacctcaatgagggcaaacctaccttaccgttgcttcacgccatgcgccacggtacgccagaacagtcagcgatgatccgtaccgctattgaacaaggtaatggccgtcatcttctggaaccggttctggaagcgatgaccacctgcggctcgctggaatggacgcgtcagcgagcggaagaagaagccgacaaagcgatatccgcgttgcagatattgccggataccccatggcgtgaggcgctaatcggtctcgcacacatcgcggtgcagcgcgatcgttaatgccgttctcttatcccgcgtactgcgcgggatatcccattaagttctaataaactccagataccctatcgcctgtttttcacatactcatccaggatttcccctggcatattctgaatattgccgccacttacatgaactttttagaacattccttcacgaagcgttatagtatcgaacgtcgtcgggttgttaaaaccgtaagtgattaatctaaggagtgatggatgtatggaaagcaagcttattgactggcatccggccgatatcattgccggactacgtaaaaaagggacttcaatggccgctgagtcacgtcggaatggattgagttcatccacgctggccaatgcattaacgcgcccatggccgaaaggagagttgattatcgcgaaagcattgggaacggaaccctgggttatttggccatcgcgttatcacgatccgcgcacgcatgagtttatcgacagaacgcggcttatgagagcgcgtaataaaaacaaacagaatgtagagtaagtgcctgtaaaacaacccccgcatcgcgttcgcgggggttgttcagcgtacagaaggttattcgcctttcacgcgttcaatattcgcgcctagcgcgcgcagtttgtcttcgatgcgctcataaccgcgatcgatgtgataaatgcgatccacaatcgtcgtgccttccgcaatacagcccgccagcaccaggctcgcagatgcccgcagatctgtcgccatgacctgggcgccagagagcgtttctacgccatggcatatgacggtattgctttcaatttccgcacgcgcgcccatgcggctgagttcaggcacgtgcataaagcggttttcaaagacggtttcagtgataaagcccgtcccttccgccaccaggttcagcaacgtgaactgcgcctgcatatcggtcgggaatgccgggtgcggcgcggtacggacattgaccgccttcggtcgtttgccgtgcatgtccagactaatccagtcctcgcccacttcgatatccgcgccagcatcgcgcagtttcgccagtaccgcgtccagagtgtccggttgcgcgttacggcagaggattttgccgcgagagatcgctgccgccaccaggaaagtccccgtttcgatacgatccggcagcacacgataaacgccgccgcccagacgctctacaccctcgatcgtaatacgatcggtgccctgcccggcgatcttcgcccccagcgtaaccaggaagttagcggtgtcgacaatttccggctcgcgcgcggcgttttcaatgatggtcgtcccttccgccagcgtagcggcgcacataatggtgacggtcgcgccgacgctgaccttatccatcacgatatgcgcccctttaagacgcccttctacggaggcctttacgtagccctcttccagcttgatggtcgcacccagttgttccagaccggtaatatgcagatcaaccggacgcgcgccgatagtacagccccccggcagagagacttgtccctgaccaaaacgggcaaccagcggccccagcgcccatatcgaggcgcgcatggtcttaaccagatcataaggcgcgcagaacacgttcacctggctggcgtcaatgtgtaccgatccattgcgttccactttcgcgcctaattggctcatgagcttcatcgacgtatccacgtctttcagttttggaacgttttggatctctaccggttcttctgccagcagagcggcgaacaggatcggcagcgcggcgtttttggcgccggaaattgtgacttcgccctggagcgtcgttggcccctgtacacgaaatttatccattattgtattctcagttaagcattcatctccgctaccggcaggttacccgtagcttaaaatccgttaagtttacgatcgcgcgcccattccgccggggtatatgctttgatcgatacggcatggatacggttgtccgcaatgtactccattagcggcccatagaccgtttgctgtttcttgacccggctcatgccgtcaaacatctcgcccacggcaataacctgaaagtgactgccatcgccggagacgtggacttcctggagggagagggcattcatcagcacactctgaatttcatgattttccatgggttctttattcgtcaaatagtgaaaacagcccaacatcttagagcaaagtcgcgccgtcttaaataagcaaaagattacgctgataaatcagcgcggtaaaagtgccggatggtgctgctaacgcaacttatccggcctacggggatcatgcgaagtgtaggccggataaaccatccggcattcattacatacggggaagtacgtcttcgggcaagttatataattgcgccagcgcgtaaaccttgtcgttaacgccagacagcgacacggcattgccctgcttttttgcctggttcacaaggtgcgccagcagcgccagtccccccgtatctaccctggagatctggctcaggtcgatacgggtaacgccattcatcgcttctacgcgcgcgtcccatagcggcgccaacacgtcctgatccagctctcccgccagcaccagagtgtccgcctcacgcgtccaggtgagttgcggcgtcattactgtttctcgtccaaagtaattttctgttgagagatagatttcagttgtgcggtcaggccgtcgatgcctttagtacgcagcaggtcgctccactcattttgcttggtggtgatcatgctgacgccttccgcaatcatgtcatacgcctgccagttgccggtctgggtgttttttcgccactggaaatccaggcgtaccggcggacgaccgttgggatcgataatcgttacacggataggcacaatggtcgcatcgcccagcggttgctcaggcgctatctggtaagtctgaccgtggtacatcgccagcgcctgaccgtatgcctgtttcaggtattcgcgaaacgctgcaaaataggcttcacgctgcgccggggtcgcctctttgtagtagcggcccaacaccagcgcgccggcatattttacctgcacgtacggcagaagttcctgatcaacaacgtctcgcaggtaatccggattggcacgaattttcggctgttcgtttttcaggcgatcaaaagttttctgcgccgcctcgttcatcagtttataaggattgctctgatccgctgccgttgctgcgcttaatggcgcaatgaccagcagggccaccatcatcagtcgtttaaacatgcctcaattctcctgagattatttcgtttcgcccgcgggcgttgtggcttcagtatgaccttccgttgcggctggcgcatcgccagaattcttattgtcgtcgcctttgctgttataaaggaactggccaatcatatcttccagcaccattgcagacttggtgtcctgaatcgtactcccatctttgaggatagacgttcccagctcaggatcttcaaaaccgacgtttaatgccagatattgctcccccagcagtccggaagttcgaatactcaacgagctggtatcgggaatatggttataacgctcttcgatgtcgagcgttacgcgcggcaggtatgttttcggatcaagcgagatatcttcaacccgcccgacaaccaccccgccgatgcgtaccggggaacgcactttcagaccgccgatgttatcgaaggtcgcataaaccttataggtcggctccgtgcgcatagaggtcacatttgccgccttcaggcaaacaaacagcgccgccagcaacgctaccagcaaaaaaacgcctacccaaatttcattttttttcgtttgcatgaactcaattcccaaacatcagtgcggtcagcacaaaatccagccccagaacggccaacgatgcgtgaaccacggtacgcgtcgttgcccggctaatcccggcagaagtcggtattgcgtcataaccgttgaataacgcaatccatgttaccgtaatggcgaacaccacgctctttatcagacagttcaccaggtccatacgccagtcgacggcattctgcatcgcggaccagaagaacccggcgtcgattcccttccagcttacgccgaccagcgagccgccccagataccgaccgccacaaagataatggtcagtagcggcaatgaaatcacgcccgcccaaaagcgcggcgaaatcacccggcgcaatggatcgaccgccatcatctccatactggagagctgctccgtcgcccgcatcaggccgatttccgccgtcaacgccgacccggcccgcccggcaaacagcaacgccgcgaccaccggccccagctcgcgcagcagcgaaagcgccactaacatgccaagactggtctccgcgctgtaagtggtcagaaccagatagccttgcagccccagcaccataccgatgaatacgccggagacaataatgataagcattgacaagacgcccacattataaagctggcgcaccagcagcggcgcatgtttgcgaaactccggcttaccgataatcgcattgaataacattaacccggcgcgcccgaacgtcctgacggttttgatcccgctgtgtccgagtgctgccagcgcatttaacagcatgagtggcttaactccctgtttcgagtaaatcaaggtgatagtcgcccgccggatagcggaacggaaccggcccgtcggcaatgccgtcaaggaactgacgcacgcgcgggtccgtattctcctgcaacgcctgagcgctaccgtgagcgacgatttttttgtccgccatgatccaggcgtgatcagcaatactgagcacctctggcacatcatgcgagaccaccacgcaggtcacgcccagcgcgctgttcaattctgaaatcagcttcaccagaacgcccatggtaatcgggtcctggccgacaaacggctcatcgaacatgatgagatccggttccagagcgatggcgcgcgccaacgcggcgcggcgcgccatcccaccggagagctcggaaggcatcagttttgccgcgccgcgcagcccgacagcttccagtttcatcatcacgacgctttttagcagcggcgcgggtaaattggtgtgctcccgtagcggataggccacattgtcaaacacgttcatgtcggtaaacagcgctcccgactgaaacagcatactcatacgtttgcggacggtgtagagccgcgaacgggacatggccggcacattctcgccatcaaataagatctcgcccttatccggcgggatctgtccgccaatcaggcgcaacagcgtggttttaccgatgcccgacggccccatgatcgccgtgatcttcccgcgcggcaccgtcagggaaatattatcgaaaatgcagcgttcgccacgggaaaagctgacgtcgcgcatatcgactaaattggccgcagactgacccattgattcatccttcgtattgccttgttgaggtaaccatggcgctgaatttaaccatgggttcgacataattacagaatattaactgacagggttagcgaaagctggcattcgttttactttttagccgcataaagtcaaaattaggacttcgttacggcttccagatatcccttccaggggaccggcgagtatacctgaagaaaggactttagatgcttttagcgatggcgctactcataattggtttgcttctggtggcctacggcgccgatcgtctggtgtttgcggcctctattttatgccgtacattcggtattcccccgctgatcatcgggatgacggttgtgagtatcggcacctcgctgccggaaattattgtgtcggccgccgcatcgctacacggtcagctcgatttggccgtcggcgcggcgctcggttctaacatcaccaatattttgctgatcttagggctggcggcgctggttcgtccatttaccgtgcattccgatgttctacgtcgcgaattgccgttaatgttatttgttagcgtggtagccggttccgtactgcatgacggacagttaagccgcagtgatggtatctttctcctgcttctggctgtgctatggctgttattcattgttaaaatcgcgcgtctggccgaacgccaggggaatgacagcctcacccgcgaacaactggcggagctgccgcgcgaaggcgggctccccgtcgcgttcttatggctgggcattgcgctggtcatcatgccgatggcgacgcgcatggtaatcgataacgctacggtgctggcgaactatttcgccatgagtgaattaacgctcggtctgacagtcatcgccgtcggcaccagtctgccagagctggcgacggcgattgccggcgtgcgaaaaggcgaaaatgatattgccgttggtaatctcattggcgccaatatttttaatctcgctatcgtgctgggactgcctgcgctgatcgcgccgggggagatcaatccgctggcgtttgggcgtgattatagcgtgatgttgctggttagcgtggttttcgctttactttgctggcggcatccgcgtcagattggtcggggcgcaggtatactgctgaccggcgggtttatcgtatggctggcgatgctctattggctatcgccacttcttgttggataactggaaacggattatgtcgcatttagcgttgcaaccggggtttgactttcagcaggcaggcaaagaggtcctggaaattgaacgtgaaggcctggcggagcttgatcaatatatcaaccagcatttcacgctggcctgtgaaaaaatgttcaactgcaccggaaaagtggtggtcatggggatggggaaatccggccatatcggacggaaaatggccgccacgttcgccagtaccggcacctcttccttttttgtacatccgggcgaagccgcgcacggcgatttggggatggttacgccgcaggatgtggttatcgctatctccaactccggcgaatccagcgagatcgcggcgctaataccggtacttaaacgtctgcacgtgccgttaatttgcattaccgggcgaccggaaagcagcatggcgcgtgcggcagatgtgcatctgtgtgttaaagtgcccaaagaagcgtgtccgttaggactggcgcctaccagtagtaccaccgcaacgctggtgatgggcgacgcgctcgctgtggcgttgttaaaagcgcgcggctttaccgccgaggatttcgctctgtcgcatcctggcggcgcgctgggacgtaagctactgctgcgcgtaagcgatattatgcatactggcgatgagatcccgcatgttaataaacatgccaccctgcgtgatgcgctattagaaattacgcgtaaaaatctcggtatgaccgtcatttgcgatgaatccatgaagatcgacggtatcttcaccgacggcgatttacgtcgcgtattcgatatgggcggcgatatgcgccagttggggatcgccgaggtgatgacgccagggggcattcgcgtgcgtcccggtattctcgctgtcgatgcgctgaatttaatgcagtcccgccatatcacctccgtactggttgctgatggcgaccagttactcggtgtgttacatatgcatgatctcctgcgtgcaggcgtcgtgtagaaactcaaggataattaacgatgagtaaagcaggtgcgtcgcttgcgacctgttatggccccgtcagcccccatgtcatgaccaaagcggagaatatccgcctgctcatcctggacgtggatggcgtattgtctgacggcctgatttatatgggcaataacggcgaagagctgaaggctttcaacgttcgtgacggctatggtattcgctgtgctttgacctccaatatcgaggttgccattattaccggacgaaaggctaaacttgtagaagatcgctgcgccacgctggggattgtccatctttatcagggacagtcgaataagttgatcgcctttagcgatctgctggaaaaactggccattgcgccggaaaatgttgcctatgtcggcgatgatctgattgactggccagtgatggaaaaagtggggttaagcgttgccgttgcggatgcgcatccactgctgatcccccgcgctgactatgtgacgcacattgccggcgggcgcggcgcggtacgtgaggtgtgcgatttgctgctgctggcgcagggcaagctggatgaggccaaagggcaatcgatatgagtaaaaccagacgttgggttatcattctactgtcgctggccattctggtactgattggtatcaatctggcggataaagacgatcctgctgccgtgatggtcaacagcaacgatcccacgtataaaagcgagcatacggataccgtcgtgtacagtccggaaggcgcgttgagctatcgtctgatcgcgcagcacgttgaatatttttccgatcaggcggtctcatggtttacgcaaccggtattaaccacctttgataaggataaagtgccgacatggtcgatcaaggccgataaagccaaattgactaacgatcggatgctctatctgtatggccatgttgaagtcaacgccctggtgcctgacgctcaattacgcagaattaccaccgataacgcgcagattaatctggtgacgcaggatgttacctcgaacgatctggtgacgttatacggcacaacatttaactccagcggactgaaaatgcgcggtaacttacgcagcaagaacgccgagctgattgaaaaggttagaacctcttatgaaattcaaaacaaacaaactcagccttaatcttatgcttgccggctcgctgctggccgccagcattccggctttcgccgtcacgggcgataccgaacagcctattcatattgactcggatcaacagtcgctggatatgcaaggcaacgtcgtgacctttacgggcaacgtggtgatgacccagggcacgattaagatcaacgccgataaagtcgtggttacccgccctggcggcgaacaggggaaagaggtgatcgacggttacggcaatccggccaccttctaccagatgcaggacaacggtaagccggtgaaaggccacgcttcccatatgcactacgagctggcgaaagattttgtggtgctgaccggcaacgcttatctggagcagcttgacagcaacattaccggcgacaaaatcacctacctggtgaaagagcagaaaatgcaggccttcagcgagaaaggcaaacgcgtcaccaccgttctggtgccgtcgcagttgcaagacaaaaacaaaggccagactccggcgcaaaagaagagtaactaattcgttatggcaacattaactgcaaagaatctggcgaaggcctataaaggccgtcgcgtagtggaagatgtcagtctgaccgttaactccggggagattgtcgggctgctcggtccaaacggcgcgggtaaaaccaccaccttttatatggtcgtcggtatcgtgccgcgtgacgcaggcaatatcatcatcgatgatgaagatatcagtctgctgccgctgcacgcgcgcgcgcgccgcggtatcggctatttgccgcaggaagcctctattttccgccgtctcagcgtatttgataacctgatggcggtactgcaaattcgtgacgatttgaccgcagaacagcgagaagaccgcgccaacgagctgatggaagagtttcatatcgagcatctgcgcgacagcatgggacaggcgctgtccggtggtgaacgccgtcgtgtagaaatagcccgcgcgttggccgctaatcccaaatttatcctgctggatgaaccctttgccggcgttgacccgatttccgttatcgacatcaaacgcattatcgagcatctgcgcgatagcgggctcggcgtgctgatcaccgatcataacgtccgtgagacgctggcagtctgtgaacgcgcctatatcgtgagccagggccaccttattgcccacggtacgccgacagaaatcctgcaagacgaacacgttaagcgtgtatatcttggggaagacttcagactctgatagggtagagggctatgctgctctagcgggagaaaacgactctgaatatgaagcaaggtttgcaactcaggcttagccaacaactggcaatgacgcctcagctacaacaggccatccgtctgttgcagttgtctacgctggaacttcagcaggaactccagcaagcgctggaaaataacccgctgcttgagcaaaccgatcttcatgacgaaatcgacacccagcaacctcaggataacgatcctctcgataccgccgacgcgctcgaacaaaaagagatgccggaagagctgccgcttgacgccagttgggatgaaatttacaccgccgggacgccgtccggccccagcggcgattatatcgacgatgagctgcccgtctatcagggcgaaacgacgcagtcgttgcaggattatctgatgtggcaggttgagctaacgcccttctcggataccgatcgcgctattgcgacatccattgtcgacgcggtagatgataccggctatctcaccgtatccctggacgaaattcgcgaaagcatgggcgatgtagaggtggatctcgatgaggttgaagccgttctgaagcgcattcagcgttttgatccggtaggcgtcgcggcaaaagatcttcgcgactgtctgctgatccagctttcacaattcgacaaatccacgccgtggctggaagaggcgcggctcattatctgcgatcatcttgatctgctggccaaccacgatttccgcacgttgatgcgcgttacccgactaaaagaagaggtgctgaaagaggcggtaaacctgattcagtcgctcgatcccagacccggtcaatcgatccagaccggcgagccggagtacgttatcccggatgtgctggtacgcaagcataacggtcgctggacggtggagcttaatagcgacagtattccccgtttacagattaaccagcactatgccgccatgtgcaatagcgcgcgcaacgatgccgacagccagttcatccgcagtaatttacaggatgcgaaatggctgataaaaagccttgaaagccgtaacgacacgctgctgcgcgtcagtcgctgcatcgtcgagcaacagcaagccttttttgaacagggcgaagaatatatgaaaccgatggtactggcggatatcgcccaggccgtcgagatgcacgaatccaccatatcccgcgtgaccacgcagaagtatctgcacagcccgcgcggtatttttgaactcaaatatttcttttccagccacgtcaataccgaaggcggaggcgaagcctcttccaccgcgattcgcgcgctggtgaagaagttaattgcggcggaaaaccccgcgaaaccactgagcgacagcaagttaacctctctgctgtcagaacaaggtatcatggtggcgcgccgcactgttgcgaagtaccgagagtctttatccattccgccgtcaaaccaacgcaaacagctggtttgacccaaccgataaggaagacactatgcagctcaatatcaccggacataatgtcgaaattactgaagccctgcgtgaatttgtgacgacaaaattcgccaaacttgaacagtattttgagcggattaatcaggtatacgtggtgttgaaagtggagaaggtcacgcacatctcggatgcgacgctacacgttaacggcggcgaaattcacgccagcgcggaaggccaagatatgtatgccgccattgacggcttgattgataaactggcaaggcagttaaccaggcataaagataaactgaaacaacactaattgtccgggcagttagccagtgcaggacggcctgttgtgtgacacaacgggccatttgtacagttagcgctccgaacctggccatcaacctgacaggacaggttcttaggtgaaattatgataaataacgatacgactctacaactgagcagtgtacttaaccaggagtgtacgcgtagcggcgttcattgtcagagtaagaaacgcgcgctggaaatcatcagcgaactggcggcaaaacagctcagtttacctcctcaggtcgtgtttgaagccattctgacacgcgaaaaaatgggcagtaccggtattggtaatggtatcgccatcccgcacgggaaactggaagaagataccttacgcgccgtcggcgtgttcgttcagctcgaaacgccgatcgcgttcgacgccatcgataaccagccggtcgatctcctcttcgccctgctggtgcccgccgatcaaactaaaacgcatctgcacacgctgtcgctggtggcgaaacgtctggcggataaaacgatctgccgccgcctgcgcgcggcgctgaatgatgaagagctgtatcaaatcattactgacaccgaaggtgagcagaatgaggcataacaactcaatggcatttatttctgtcgttgtgaggagaaacggtacatggtactgatgatcgtcagcgggcgttccggatcaggtaaatctgtcgctctgcgcgcgctggaagatatgggattttactgcgtggataacctccccgtcgtgctgttgcccgatctggcgcgaacgctggccgatcgccagatttccgccgccgtcagcattgatgtgcgcaatatgcctgaatcacctgagatttttgaacaggcgatgaataatctgcctggtgctttctcgccgcaattgctgtttcttgatgccgaccgcaataccttgattcgccgctacagcgacacgcgccgtttgcatccgctttccagcaaaaatctttctttagagagtgcgatcgataaagagagtgacttgctggagccgttacgctcacgtgcggatctgatcgtcgacacttcagaaatgtccgtccatgagctggcggagatgctgcgtacccggctgttgggcaaacgcgagcgtgaactgacgatggtatttgagtccttcggctttaaacatggtatcccgattgatgcggactatgtgttcgatgtccgctttctgcccaacccgcactgggacccaaaactgcgccccatgaccgggcttgataagccggtagccgcgtttcttgaccgacacacagaagttcacaattttatctatcagactcgcagctatcttgagctatggttaccgatgctggagaccaacaaccgcagctaccttaccgtcgctatcggttgtaccggcgggaaacaccgttcggtgtatattgcagaacagctggcagactacttccgctcgcgcggtaaaaatgtccagtctcgccatcgcacgctggaaaaacgcaaaacatgaccgtaaagcaaactgttgaagtcaccaataagctgggcatgcatgcccggcctgccatgaagcttttcgaactgatgcagggttttgacgccgaggtgctattacgcaatgacgaaggcaccgaagcggaagcaaacagcgtcatcgcgctgttaatgctcgactccgccaaagggcgtcagattgaaattgaagccaccggcccgcaagaagttgaagcgctggcggcggttatcgcgctgttcaattccggctttgacgaagactaaacctccccctctataccctatttcccccaacgccgtcccggtatttgatgacagtcaccccaaaaccgggcgtgttacgcctgcctgcctcttgtcccgcagccccaccctttcgtaagatttgtacatttcgtgcgctttacctatgcataaaaacattaagaaaaccttaaaaaatttcgtttaggttttgtttaagttctttgtccatactaaatttatgtgaataaatttttccaggacttgccatgatcctcttatcgaaacagactccgctgggcgccggtcgacatcgtaaatgctatacgcatccggataatgcccggcgttgcataaaagtcatttacaaccgtgaccacggcggtgataaagagattcggcgtgaactgagctactatgcgcatctgtcccgctacctgacagactggagcgctatcccccgttattacggcacggtagaaaccgattgcggcaccggctatgtctacgacatgattaccgatttcaacggcgcgccctctattaccctgaccgagttcgccgcgcaatgtcgttatgaagaggatgtcgctgtcctgcggcggctactgaaaaaactgaaacgctacctgctggataaccatattgtgacgatgtcgctgaagccgcaaaacatcctgtgccagcgtatcagcgagtcagaagtggttccggtggtttgcgacaatctgggggaaagtacctttatcccgctggcaacctggtcaacatggtgctgtgaacgcaaactggagagagtgtggcagcggtttatcgcccagcctgcgctggccgttgccctggagagggacgcgcagccaaaagacaagaaacggctggcgcttacttctcacgaagcttaatggcctgtgcttatcaggcccggacgacacagatcgcaggccggataaggcgttcgcgccgccattcgacaaaattaattaagctggttgcgcgtcataaaagattccccacccagttggcgcatctggcgcataatccacgcctgccggctacgcacatagccggaaggcgcattcgccttatagcgaatcgggttaggcagcacagccgccagtaacgcggcttcagacagactcaagcgactggcaggtttatgaaaataccgttgtgccgcagcctccacgccgaaaataccatcgccaaactccgcgatattcagataaaccgtgaggatgcgctttttgctccagacagtttcaatgcccagcgttagcccggcctccagacctttgcgcacccaactgcgtccatcccataaaaagagatttttcgccgtttgctgcgaaagcgtagaggcgccgcgaatacggctctcattccgctcattatgcgccagcgctttttcaatcgccggaacatcaaagccccagtgctcagggaacttctggtcttccgccgcaattaccgccagccccatccacggcgagatatccgccatactgacccagtcagaatgcgccacataaccgaactctccgccgagccaggcgctaatctgccgttccgccatcaccgccgaaaaaggcaccggaaccacgctaaacagcgcaatgccgccgccccaaaagacggcgagcgcagcaaggatacgtaaaagtagacggcgcaaaaacgttaacggcgcgatgcgtcgtttgctcattccgccagaaccagcacgcgcgacactaatttatcaatgccgcttgccgcctgggcgatatcctgcgccagcatataggcaggggtggtcacgaccttgttatcctcgtccacaacgatatcatcaaccgggcaaggtacgtgttcggcgcccatctcttcaagtacttcagcggtatcaatatccgtccctattgtcagacgtagcgggaagtcaaagattttcggcaacattgcgggcgcgatacagatgaatcccagcggcttgccggactggtgcatggccttcgccagcgcgacgacatcgctatccacccggcattcgctcccctggctggcgaaattactcaggttcttcgccgcgccgaaaccaccaggcacaatgagcgcatccagctcctctggctgagcctgggacaggggacgaatatcgccccgcgtaatacgcgccgcctcaatcaggacgttacgcgtttccgccatcgcttcgccggtcaggtgattaataacatccgcttgtggtttatccggcgcgaagcagacagcctgcgcgccgctgcgggcaatggccagcagcgtcagaacggcctcatgaatttcggtgccgtcatagacgccgcatccgctgagcactacgccaatttttttcatggtgaacatcctcctgcaaccgactcaagcccattaataattttgattaaaatgctacgcttcacacatttaaatgattcatgtaacaaatcatttaggatttgctatcttaactgcgtgcggcctgaaaacaggactgcgcctttgacatcatcataataagcacggcgcagccacgatttccctggtgttggcgcagtattcgcgcaccccggtcaaaccggggtcattttttttccgcgtttgccacccaggctttcagcaccgcgacatcgtgctgccactcctgcttcatctcttcaatccattccacgacattatcttcccaggcgggaagatccggcgactggatttgctggccaagttgttgcagatgacgcagccctaccgaaccggcggcgcctttaatcttatgcccttcctcaacaacgccttttttgtcacgcgccgttagattggactccagcacgcttaaatagccaggcatcattttttcaaacaccgcgagaccgtcggtgatcaatttaggcccaaccaactcgatgtattgttccagcatcgggatatccagcagcgcttgcgctttatcgctctcttcaggcgtcacggtactctcctctttatcggtggcatcccagaattttttaatcatcgcggttaaggccggcaccgacagcggcttactcagcacatcgtccataccagcgtccagatactcttttttatctttcagaacgttagccgtaagcgctaccagcggcggtaaatcttcccgcgtgtggcgacgggtcagttctctggcgatatccagacccgtcatatccggtagctgaatatccagtaagaccaggtcgtattctcccggcacgaacatctccagcgccgccttgccggtcatcgcgacatccacgctgttccccagtttttccagtaccgaacgcgccacgatcacgttcagttcaatatcttcgaccagcagaacatgcagcgcgggcagcggcatgtcgtcttcatcaaaggcgtcctccacctcttccgccaccgctggcgcatgaaccgttagcgtaaaggtcgatcctttgcccggcagactggaaacggtaatatcgccgcccatatttttcgccagccgacgggagaccgccagcccgataccggtccccgtcgccggtttgccgccgttactgtctttcacctgataatacatggcgaaaattttatcctgctcatcctgcggaatgccgatcccggaatcttccacttcaaagtgcagcatgtcgccttcatcatagcgcgcccgcaccgtcacctggccctgctgagtaaacttcaccgcattgctgatcaaattccataaaatctggcgcagacgcgttccgtcggtaatgactttgtgcggcaacggcagcgtcggctcaagcacaaaacgtagccctttttgctgcgcctgcaaaccggaaaggttttccagatcggccataaagctggtgaaatcaatgggttggttatcaagctgaaccttacgccgctccatcttatccatatcaatgatatcattgaaaatattgcctaacgtcacggcggagacatggattgtcttaaggtatttttcctgttcggcggtgagatcggtatccagcaggatgcggcttaaaccgacgatgccgttaagcggggtgcgcagctcatgactgatggtagagataaacgtggtcttgtcgcggctggcgcgctccagcgcgtcctgataacgcttacgttcggtaatatcacgaccaaatcccatcaggccatgacgtttaccgacacggtcgtaataaggcactttacgaatttcaaagcaggcctttcgtccgtccgggtaatccagccactgttcgtaggtcagggagacgttatggcggaatactttttcgtcggtttcaatgactttctccgccgcttcgggagagtacacatcttccggcttcaaatgcaccagctgtttttcgctcttgccggttagcaattccattgcgcggttacagccggaaaattctttatcctcattacgataaaaaaccaaatccggcgaggcgtccagaaaggagcgcagaaaagaggattgctgttctagctggatttgcgcttcttcacgctctttaatttctacttttagctgttcaaatgtctcttgcagctccgcttccgctttttcgcgatcggcaatttcctgattaagctgggcaatattgtccttcaactgtacgttaagcttgagatcgcgctcgcgcatctcctccagcttttgcaccagacgcgacagtcgctgccttgactcttccagttgttcaacaacaacggataagaaatagaccgcccagggcgtaattaacaggccaaaaaagatggaacgaataacgtcgatactttcaacctgaccatgcagcaccatggtcaccgccatctgcacgacaatcgccagcaccaccaatgccaacgccaggagcatggaaaagcgcaccagacccaatttcatcatcaggtcgacatagtattgcgccagcatacgaatttgcttcatagaggattccttcaccacaacttcgcacataatacccaattatgggaaccgcgttgaatattgtgcgaaatatgcgtagcgcccctcatcacgctacgctacaggtggtatccagggacgggccagcgcagagccctgtacgccatgctcattcaggtatttgtccagctcaaccatccccgtccagcgattctcgcaccacagcggggcaagcagcgtcggacggcgagcgctggctgaaattcggtgataaattacctccggcggcgtatgacgaatcatctcacctgccgttagcgtgtagtcgtccagttcgatgccgttcagccgccccgcttcccaggctttggccatcgtactgcctttcacaatatgcagcggatgcagtttaataccatcaacgcccgtctccaccacacgctccatggtttgcaggcattctgcctgcccttcgcccggcagccccacaatcagatgcgcacacactttcagcccgcgctcccgggcaatccgggtggtacgctgatagcaggcgaagtcatgcccgcggttaattcggcgcagggttttatcgtgtgcggtttgcaatcccagttccagccacacctcgtagccttgatctttatattcacacagtaaatctactactgcctgcgggacgcaatccggacgcgtaccgacgcataacccgacgatactggcctggctgaccgcctgttgatacatggaacgcagcacctgcacttctgcaaaggtgctggtgtaggcctggaaataggccagatagcgtttagcgcggttcaccagatgcgcctgatgcgcaagctgctcggcaatcgaatgatgctgctgcgcctcatcggcaaaagaggcgacattacagaaggtgcaaccgccacgcccgatggtgccgtcgcgattagggcagctaaaaccgccatgaagcgtcagcttatgaaccttttgcccataccgacgtaaaagatccccaccaaacatattgactaatttctgtaactgcataatctgatagaccgcctcttaaaaagaggccaaagcctgccatttttagtctcctttggcgatgacctggatcaatcgtcccggaaggcttttatccattgcataatcaagcaaaataaacgatatttcattcataatcccgctgatgatttttcctgatattcccctcttttttcagcgtttgctgggtcatcgataaaaacagtagcattcaatactgctcacgcttaaaacagcataaaatgccaagatttttgaaaaagcaaggtcagataatgcctggcgagcggctcttatagtgagacagatcacaggctttctgccgctccgtattagcagcccttctataaaaaaccttttaatttcaaaagattcaaaaagttatctgtgctacagcacacttttgcataaatcagtttgccatttgacctgggtgtggattcccgataagttggggatccgctggaagctttctggatgagccgtctgctcatcatatttatgcagtaattgagattccctcttaaccgtatttaccaatgcgcaaaggacacaaagagggcgaatgcgaggtaagcgtatgatgcgccagccccgtcgccatgctcttgctgtgcccgcgcgccgtcggttgggagagcgtcccgtagagcctggggaggttcactgatatgttgtacgataaatcccttgagaaggataactgtggtttcggcctgatcgcccacatagaaggcgaacctagccacaaggtagtgcgtaccgccatacacgcgctggcccggatgcagcaccgtggcgcgatccttgccgacggtaaaaccggcgacggttgcggcttgctgttacaaaaacctgaccgtttctttcgcatcgtggccgaagagcgcggctggcgcttagccaaaaactacgccgtcgggatgatatttttgaataaagatcctgaactggccgccgcgtcacgccatattgtcgaagaagaattacagcaggaaaccctgtcgattgtcggctggcgcgatgtgccaaccaatgaaggcgtgctcggtgaaatcgccctctcctccctgccgcgtattgagcagatttttgtcaacgctccggcgggctggcgtccgcgtgatatggagcgccgtctgtttatcgcccgccgacgcattgaaaaacgcctgcaggacgacaaagatttctacgtatgcagcctgtcgaacctggtcaacatttataaaggtctatgtatgccggcggatctgccgcgcttctacctggatcttgcggatctgcgtctggaatcggccatctgcctgttccaccagcgcttttccactaacaccgtgccgcgttggccgctggcgcagccgttccgctacctggcgcataacggcgagattaacactatcaccggcaaccgccagtgggcgcgcgcccgtacctataaattccagacgccgctgatcccggatttacagtccgctgcgccgtttgttaacgaaaccggttcggattccagctcgctggacaacatgctggaactgctgctggcaggcgggatggacatcatccgcgccatgcgcctgttggtaccgcccgcctggcagaacaaccccgatatggaccaggatctgcgcgccttctttgactttaactccatgcatatggagccgtgggacggtccggcaggcatcgtgatgtccgacgggcgcttcgccgcctgtaaccttgaccgtaacggcctgcgcccggcacgctatgtcattaccaaagataagctgatcacctgcgcctccgaagtcggtatctgggactatcagccggatgaagtggtcgagaaaggccgcgtcggcccaggcgagctgatggtgatcgacacccgcggcggacgtattctgcattccgcggaaaccgatgacgacctgaaaagccgccatccatataaagagtggatggagaaaaacgtccgccgcctggtgccgtttgaagagctgcctgatgaagaagtcggtagccgcgaactggacgatgacctgctcgccagctatcaaaaacagtttaactacagcgccgaagagctggactcggttatccgcgttttgggcgaaaacggccaggaagccgtcggttcaatgggcgacgataccccctttgccgtgctctccagccagccgcgtattatttacgactacttccgccagcagttcgcgcaggtcactaacccgcctatcgacccgctgcgtgaagcgcacgtcatgtcgctcgccaccagcatcggtcgcgaaatgaacgtcttctgcgaagcggaaggtcaggcccatcgcctgagttttaaatcgccaattctgctgtactccgatttcaaacagctcaccaccatgaaagaggagcattatcgcgctgaccgtctggatatcaccttcgacgtgaccgaaaccacactgaacgcgacggttaaggcgctgtgcgataaagcggaacagatggtgcgcaacggcaccgtgctgctggtcctctcggatcgcaatatcggtaagaatcgcctgccggtccccgcgccgatggcggtgggcgcggtgcaaacgcgtctggtagaacaaagcctgcgctgcgacgccaacatcatcgtagaaaccggaagcgcccgcgatccgcatcactttgcggtactgctcggctttggcgcaacggctatctatccgtacctggcctacgaaacgctggggcgtctgattgatacccaggccatcgccaaaaactaccgtaccgtgatgcagaactaccgtaacggcatcaacaaggggctgtacaagattatgtccaaaatgggcatttcgaccattgcctcttaccgctgctccaaactgtttgaagcggtcggactgcacgatgatgtggtaaacctgtgcttccagggcgtggtcagccgtatcggcggcgcgagctttgatgacttccagcaggatctgctgaatctctccaaacgcgcctggctggcgcgcaaacccattagcccgggcggcctgctgaagtacgtccacggcggcgaatatcacgcctataacccggatgtcgtgcgtaccctgcaacaggcggtacagagcggcgagtacagcgattatcaggaatacgccaaactggtcaatgagcgtccggcgtcaacgctgcgcgatctgctggcgatacatccagacggcgaggcggtgactatcgacgaggttgagcccgccagtgagctgtttaaacgctttgataccgcagccatgtctatcggcgcattaagtccggaagcgcacgaagcgctggcggaagcgatgaacagcctcggcggcaactccaactccggcgaaggcggcgaagacccggcgcgctatggcaccaataaagtgtcgcgcatcaagcaggtggcttccggccgctttggcgtgacgccagcctacctggtcaatgccgatgtgattcagattaaagtcgcgcagggcgcgaaaccgggcgaaggcggtcagttgccgggggataaagtcactccgtatatcgctaaactgcgctattcagtgccgggcgtgacgctgatctccccgccaccgcaccacgatatctactctatcgaggacttagcgcagctcattttcgatctcaagcaggtcaacccgaaggcgatgatctccgtgaagctggtatccgaaccgggcgtcggcaccatcgcgaccggcgtggcgaaagcctatgcggatctgatcactatcgccggctacgacggcggtaccggcgccagcccgctctcttcagtgaaatacgctggttgcccgtgggaactcggacttgttgaaacccagcaggcgctggtcgccaacggtctgcgtcacaagattcgtctgcaggtggacggcggtctgaaaaccggcgtcgacatcattaaagcggcgattctcggtgcggaaagtttcggcttcggcaccggcccgatggtggcgctgggctgtaaatacctgcgtatctgccacctgaataactgcgcaaccggcgtagcaactcaggatgacaagctgcgtaagaaccactatcacggcctgccgttcaaagtgactaactactttgaatttatcgcccgcgaagtgcgcgagctgatggcttcgcttggcgtgacccgcctggtggatttgattggccgcaccgacctgctgaaagagctggagggcttcaccgctaaacagcagaagctggcgctgtctcgtctactggaaaccgctgaacctcatccgggtaaagcgctgtactgcaccgagaataacccgccgtttgataacggcgtgctgaatgcgcaactgttgcagcaggcgaaaccgtttgtcgatgcgcgccagagcaaaaccttctggttcgacatccgcaacaccgatcgttccgtcggcgcgtcgctttccggctacatcgcacagacccacggcgatcaggggctggcttccgatccgattaaagcacacttcagcggtaccgcaggccagagctttggcgtgtggaacgcgggcggcgtagagttatatctgactggcgatgccaacgactatgtcggtaaaggtatggcaggcggtttgattgccatcagaccaccggtaggttccgccttcctcagtcataaagccagcattatcggcaacacctgcctgtatggagccaccggtggccgtctgtacgcggcgggccgcgcgggcgaacgtttcggcgtgcgtaactccggggcgattaccgtagtagagggcatcggcgacaacggctgtgaatacatgaccggcggcatcgtctgcgtgttgggtaaaaccggcgttaacttcggcgcggggatgaccggcggcttcgcctatgtgctggacgaagatggcgaattccgtaaacgcgtgaacccggaactggtagaagtactggacgttgattcgctggctatccacgaagagcatctgcgcggtctgatcaccgagcacgtgcagcatactggttcgcaacgcggcgaagagatcctgtccaggtggtcaagcttctcaacccaattcgcgttagttaagcccaagtccagcgatgtcaaagccctgttgggccaccgtagtcgtagtgcggcagaattgcgcgtgcaggcgcagtaaggaattgaaatgagccagaatgtttatcaatttatcgacctgcagcgcgttgatccgccgaagaaaccgctgaagatccgtaagatcgaatttgttgaaatctacgaaccgttttctgaaggtcaggcgaaagctcaggcggatcgctgtttgtcctgcggtaacccctactgcgagtggaaatgtccggtacataactacatcccgaactggctgaaactggctaacgaagggcgtatttttgaggcggctgagctatcgcaccagaccaacaccctgccggaagtgtgtggccgcgtctgcccgcaggaccgcctgtgcgaaggctcctgtacgctgcacgatgagttcggcgcagtgaccatcggtaacattgagcgctatatcaacgataaagcgttcgaaatgggctggcgcccggatatcaccggcgtgcgccagacggacaaacgggtagcgattatcggcgcaggtccggcagggctggcgtgcgccgacgtgctgacccgcaacggcgtgaaggcggtggtctttgatcgccatccggaaatcggcggcctgctgaccttcggtattccagctttcaaactggaaaaagaggtgatgacccgccgtcgcgagatcttcaccggcatgggtattgagttcaaacttaataccgaagtgggtcgtgatgtacagcttgaagatctgctgaaagattacgatgcggtattccttggcgtcggcacctatcagtcgatgcgcggcgggctggaaaatgaagatgcggacggggttttcgacgctttgccgttcctgatcgccaatacgaagcagatcatggggtttggcgaaaccagcgacgaaccatatgtcagcatggaaggcaaacgcgtggtggtgctgggcggcggcgataccgcaatggactgcgtacgcacttccatacgccagggcgcaacgcacgtaacctgtgcttatcgtcgtgatgaagagaacatgccgggttccagacgcgaagtgaagaacgcgcgcgaggaaggtgtcgaatttcagtttaacgttcaaccgctgggcattgaagtcaatgccaacggcaaagtgagcggcgtaaaaatggtgcgcactgaaatgggcgaaccggatgccaaaggccgtcggcgggcagagatcgtcgccggttccgagcatgtggttccagctgatgcggtggtgatggcatttggttttcgtccacacagcatggaatggctggcgaaacacagcgtggaactggactcgcagggacgaattatcgcgccggaacgcagcgataatgctttccagaccagcaacccgaaaatcttcgccggtggcgacatcgtgcgcggttccgatctggtggtgacggcgattgccgaaggccgtaaggcggctgacgggattatgaactacctcgaagtgtaacccttccggctccccgcttactgccttggctgatggctggggagccgatattcctctcctcaatatctctcctgccgattctggaaacccgctcgtaaatcgagatgtaatgccatgtaaaatccgctcatggattgatccgtttacgcctgaagcgtattgatagcgttctaatttcacaatgaaactatcacgtaagggatgacatgacgaatccaactttagcgccacagtctgatgaatatcagcaaatccataacggaattgttcaactgctggacacagcgcggacacaaaccgttcgcagcatcaacaccatcatgacagcaacctattgggaaatgggtcgacgcattgttgaatttgaacaaggcggtgaagccagagcggcttatggtgaacagctaattgatcgtttatcacaggatttaagccaaagatataaacgaggtttttctgccagtaatctatggcaatttaaaaagttttatctttattttcaaaaaattgagattctccagacagtgtctggagaatctctccatttggcgcaactggctaaatctttcccactcccctggtcggcgtatgtccgcctcttgtcggtaaaaaatcccaatgcccgcactttttacgagaaagagacgctacgtaacggctggtccgtacggcaactcgatcggcaaatcgccactcaattttacgaacgaacgctactgtcccacgacaaatccgccatgttgcagcagcctgcacccgccgagccaaacgttttaccggagcaagccatacgcgacccgttcattctggaatttcttaacctgaaggacgagtattccgaatcagacctcgaagacgcgctgctcagccacctgatggactttatgctggagctcggtgacgattttgcttttgttggccgccaacgccgactacgcatagacgatagctggttccgcgtcgacctgctgttcttccatcgtcgcttgcgctgcctgttgctcgttgacctgaaggtaggcaaattcggttatgcggatgccgggcagatgaatatgtacctgaactatgccaaagagcactggacaatgcccggagaaaacccgccagtcggcttagttttgtgcgcagggaaaggcgcgggggaagcacattacgcgctgactggcctgccaaacaccatcatggcgagcgagtacaaagtgcagttgcccgacgaaaaattactcacagacgaacttattcgttcgcaaaccatgctggaaactcaactcacacgcggtggttcactgacaacggagaaaaactaacgaaccattaatgccatgaataattatcaaaaaaaatatcacacgaaaacgtttgctttattctggaaactgtatattatgcggcggattttttgggcaaaattcatggaggcgttgtgtcgcaggacaacaattatagccagggccccgtccctctggctgcgcggaagggcgtgattccactgacgtttgtcatgttgggtttaacgtttttttccgccagtatgtggaccggagggacactcggcaccggtctttcttataatgatttcttcctcgcagttctcttcggtaatctcctcctcggtatctacactgcatttcttggttacatcggcgcaaaaaccggactctccacccacctccttgcacgttactcctttggcgttaaaggctcatggcttccctcgctactgctaggcggtactcaagtgggctggtttggcgttggcgtagcgatgttcgctattccggtcagtaaagcgacgggcattgatgccaatattctgattgccgtttcgggtctactgatgaccctgaccatttttttcggcatctcggcgctgaccattttgtctatcgttgccgtacccgcgatcgttattctgggcagctactccgtctggctggcggtcagcggcgtgggtgggctggagcatttaaaaacgatagtgccgcagacgccgctggatttttccagcgcgctggcgctggtggtgggctcgtttgtcagcgccggtacattgaccgccgacttcgtccgcttcgggcgtcatgccaaaagcgccgtactgattgcgatggtcgcttttttcctcggcaactcgctgatgtttatctttggcgcggcaggcgctgccgccgtcggtcaggcggatatctctgacgtgatgatagcgcaggggctgctgctgcccgcgattgtggtgcttggcctgaatatctggaccaccaacgataacgcgctgtacgcatcgggtctgggcttcgccaatattaccggtctttccagccgtacgctgtcggtggtgaacgggattatcggtaccgtgtgcgcgctgtggctttacaataattttgtcggctggctgacgttcctgtcatctgccatcccaccgattggcggagtgattattgccgactatctgttgaaccgccgccgctatgccgacttcaacaccgtgcgctttattcccgttaactggattgctattctttccgtcgcgctgggcatcgccgccggacattatgttccgggtattgtgcccgtcaacgccgtactcggcggcgtcttcagctatatcctgctgaatccacttttcaaccgcagccttgctaaatcaccagaggtcagccatgcagaacaataacatcaccattcgtcagacgcgtctgcagggacacgaaggattatggcagattacgattgaaaacgggcgctttagccggattgagcctcaggaagccgcatcgttaccgcagggcgaagtgcttgatgccgaaggcggtctggctattccaccgtttgttgagccacatatccacctggataccacgcaaacggcgggtgaaccgagctggaaccagtccggcacactgtttgaagggattgagcgctgggcagaacgtaaagcaatgctcacgcatgaagatgtgaaagcgcgcgcgatgcagaccctgaaatggcagatggctaacggcatccagtacgttcgtactcacgttgacgtttcagatcctacgctcaccgcgctgaaagccatgctggaagtgaagcaagaggttgcgccgtgggtagacctacaaatcgtcgcctttccgcaagaaggtgttctgtcttatcccaacggtgaagcgctgttagaggaagccgtgcgtttgggcgctgacgttattggcgccattccgcactttgagttcacgcgggaatatggcgttgaatcgctgcacaaaatctttgcactggcgcagaaatacgatcgcttgatcgatgtgcactgcgacgaaattgatgacgagcagtctcgctttgtcgaaacggtcgcggcgctggcgcatcgtgatagcatgggggcgcgcgtgaccgccagccacaccacggctatgcactcgtacaacggcgcgtatgcgtcacgcctgttccgcctgttgaaaatgtcggggattaacttcgtcgccaacccgctggtgaatattcatctgcaagggcggtttgacacttacccgaaacgtcgtggcgtcacgcgggtgaaagagatgctggaagcggggatcaatgtctgctttggccatgatgacgtcttcgacccgtggtatccattaggcaccgccaatatgctgcaggtgctgcatatggggttacacgtttgccagttgatggggtatgggcaaatcaacgacgggttaaatctgatcactatccacagcgcaaaaactttgcacctgcaggactacggtctgagcgtcggcaatgccgcgaatctggttatcttacccgctgagaatggattcgacgcggtacgtcgccagacgcctgcccgttactcgattcgccacgggcgggtaattgccgagacggtgccgagccagacgacgctgcacctgacccagccggaagccgtgacgtttaagcgttaacccgtcatacccgcgctctccggcacattcaccacgcagccccgtaaggggctgcgttcggaagactgctccggcaagagattcaggccgccagcagactggcgcgtactttcactaccactttcttgatgtcatccggctcacccactgcacatcccggtttatgcggttctcccggcataaacacagcaaacatccccgcttgcagcgtaatagtctgctcgtcgacaatttgactacaaagctggtaatcctcttcaacgtgcatctcctcgcactggcgagcggcaccggacatcccaaacgcaatacgctcgacgccggttagtagtagctgaatatcaatgtattgttcatgcaattccgctttcttctcggccggcatttgcgtcgttaactgcattacattcataaagacattgtcgccctgcaattcatagcgccccggcgctttctcctgcggccttgccgccagcgcgagagtcaaggcatccaacaatcgcggatgcaacccgcaagaaggcaacgactgtacttcccccatcatcataatgtgtctccttgagctaacaacgcagcgcctaataatcctgcgtcatgccgatagcgagcggcgctcagcgccacgtgataaggcgcaggctcttgcatcaaaaacgcgcgaacctgctccaggtatccctcagctaaccctacgctgccgccaatgaccacacactggcagtcggtagtcgctttcacatcggcgatcattcgcgctattacctgcgcggattggcttaccagatgtcgcgcctgctgatgaccttcgccagcgcgaataaatagggttttggcgtcgcatcccgccagatcgtcccgcgccgccgcggccatccctcgtccggaggcgatggcctctacacaaccaacgcgtccacagccgcatacgggcccgtgtgggtccgccagggtgtgtcccaggtgcccggccagaccgccttttccggtaaggagcttgccgtcgcagacaacgccgccgccaacgccggttgaaacggtgataaataccatatcgcggatatcatcagggagcgcgtgatactccgcccaggccgccgcctgcgcgtcgttcaccgccagcgtcggcaggccagcgatcgcttccagtgtttgtactaacggaaagtgtagcaagccgcccagattatgggggtttagcgccagcagcatcccttcctgaatgatcccggtagaagctatcgctacctgacgcgcctctgctcgtagtggttcaaccagcgcctttaatgcttcacgtaacgcatccggcgttttgctcgcgggggtcggtagctcgcgacgctggctaatgcgcaagttgttgtcgatgagcgcggcggcaagtttagtaccgccaatatcgattgctaacgtagtcatgacgccgccttttttaatgcgtcgttataccatccacagatatgttccagacgggtaatggcggaccccaccgtcaccgcccatgcgccatagcggatcgcctccgccgccagtgctggcgagttatagcgcccttcggctattacccggcatccggcgtcatgcaacgctttgactaagggcagatcgggttcctccggcgtatcgggggtggtgtagccggacattgtcgtgccgataatgtccgcgcccaaccgttggcaggcgagaccatcgtccacggatgagcagtcggccatcgccagtagatggtggtgatgaatgcgcgccaacaacgcctcaacggctaccggccgttgccgagcggttccatcaacggcgataatagctgcgccggcctgcgccagcgcatctacatcgtcgagaaaaggggtaatgcgcactggagactcatccagatcgcgtttgataatgccgataatgggtaccgaaacgagcgagcgggtcatacgcaggttgtctatgccttcaatacgcaccgcaaccgcgcccgcctgttccgctgccaacgccattgccgctacaatctccggcttatccagcgggctgcccggaacgggctggcaggagacaatcaggccgccagaagcggcaatatttttatccagttgttcaagtaacgacatactactcccttacaaatattgcccggttgaaaaccgggcaagcggattaacttttcgtttttacaaaggcacctttaccactgccaagcggtacggctccgctgaacggtttgtcgtcgatagcatcatgggtgcgtaacgcttccggacgtagccaacgctgtacgcgagacggcatatcaagcccaataagcaggatcacgacaaacgtcaggctgaaagagagcgatgccagcgcagtgcccagatccagacgttgagcgatcagcgctcccaggatcggcgccagcgcgccgccgagcgcgccgacgttataagtaaagcccagccccgccgcgcgctgatcggtatcgaagtaaccgccgatcagtttcggcagaatcccggcaatcccctgccccaacatctgttggaaaaacagtagcagacccagaacccagacgtttgtgccgccaatcgcaaagaccggaataatgaggatttgcgaggccagcaggctacagacatatgctttacgcgttcccagccagtcgccaagaaaaccgcctacgcagcaaccaaccgccgcgccaaatccgctaaagaacaggacattcgccaccgtatgcggatcgtaggccagctcggttttcagataagtgggtaatagcgcctgaatcggccaggaatagaggaaagcaaacagtaccaccagcatcagcatgacgccagtgggccagcgtttaccgctgctctgcaccataaagctgataaagataaccgcgcacagtagtcccagccccgccacaatcgcagcattttgtaggttaccggcaaaacagaaccacagcgcagcggcggcggcgaaagtcattaaaatgttgatgatgcgatgttcgccccgataaagaatgtcgaccatcgtacgtaccggcgctttacccgcgtgtttctctttccagtcttccgcttccggaatgtttttccgcagccagagagcgaagataattggcaaaatgccaatgaaaaacagcgcgcgccagccccagacaggcaccaccaggctgtacacctgcgcggcaacgaccgcgccgacggagaagccggaaatcagaaaaccgctggctttattgcgtaaatgttttggccagctttcaatcacataggtcgcgctggaaccatattcgcccgccatgcccataccaatcaccagtcgggcgatgaacatggtggtgtaaccgggcgcaaacccgcatgccagggttcccaccgaaaacagaatgatgctgctgaccatcgccagacgacgcccatagcgatcgcccatcgcgcccagtaataacccgccgaaccagcgagagataaaagccgcagaaatcaggcttgccgcctgtaccgtcgtcagcccaaattcgctttgtacctcagtcagtacaagagcaatcaacacaaaatcaaaaccatcaagcagatatcccagccaggcagcggaaaatgcccgccactgcgcccggttgagatggcgataccacgggatgttctgggtagaagtactcattttactctcccgacgatttttgttgtcgttatgccgaatggcggctccgccttatccggcctaccgctcacactgttgtaggccgggcaagcgtagcgcccccggcattatgctgttacgccttttcttccatcagttgttgagccagcgccttgagcgccggcaggtatttttcatcaacaggcgcgaacggtttacgacacagcggcaccgataccacgtccatataatgcaggaccgttttcaggccgcggaatacgccggttttaatcagtaaatcaataaccttattgcactcggtttgcagacgctgcgctttcgccacatcgccctcacgtaatgcctgcacaatcccctggtaacgccagcccataatgttgtatgtgctgccgataccgccgtccgcgcccgccagcaggccggaagcgaagatttcgtcataaccgttgtacagcaccagatccggatgcgcgcggcggatctgctccatctggaagagatcgccggaggtttgcttcagcgcgctcacgcccggtaatgtcaccagcgtattgatctgatcgagggtaagttttacaccgcttaacgccggaatgttgtataccaccatcggcaatccatctgcggaatcaatgattgcccgataatggtcacagtgctcttcaaaactgaaagggtaataaaaaggcgtcaccgcagagaccgcatcaaaaccgtaacgctttgcggcgctggcaagctgctggctttctgcggtgcttactgtcccgacatgggcgatcaacgtgatttttcccttcgcctcttcggcgacaatctccagtacctgctctctttcagcaaggctctgtacgaatgcttccccggtggaaccgccaacgtacagcccgtcgataccctgcccgatgttaaaacgcaccagacggcgcaggctttcgctatccagttgctgctgatgatcaaatggggtcaacaacgccgccattacgccttgcaatgcttttgccatacctacctctacggatgatgaatatattaactacctacctttatacctgttataccagatcaaataagcagcaaataatacagaacgcttatagtgcgatctgcttcactaaaccgggatcggaggtgcgatcgctaccgcattttttgactttttttaccgagcgcgtgccaggtagcggaaacgctattgaggtgggtttgcagagcgcgatccgctttatcgggatctcgctggcgaatggcatcaacaatcacaatatgttgttgataactcacgttattatgttcatgcagctcacgatcgggaacgcttgggcgagcggcgattagccagtccagcagagcaacatgaatagccataaagatcggattgccgggaatttcagccagcacccggtgaaactcgacatctgaacgaataaacagcgcgttgtcatccagcgactggctattaatttccagcgctttcgttaacaacgcgatctgctcgtcggtagcatgttccgccgcatagcgtaccaggctggattcaaagaaaagccgtagctgttcaaagtgagcgatgccgccaggatgagtaagaaaatctttcgccatacccgacagttcactgatgatggtatcagcggaggggcgcgagacgcgggcgcgttcgccgttattgatttgcaccagacctttacgcttcagcgcagctaacgcttcacgcacggagggacgtcccacattgaagaaggccattaattcacgttcagacggtagctgttctccctcgccaaactcatgacggcggatcatctgctccagctcttcctcaaccatttcagacagttttttacgcgccagcgggcggcggcgcaaactacgcccgagggatgtcggagaatcttctgcttgcgaatcaaatgcgttcataacgtccattcatgagtggtcggtggcaaataatagcaagcttatcgtaacacagctttaaaagcagggtgaacccgagaggagaccaaacaaaacaggcccttcagggcctgttgattattttactacacgcagcgccggacgtccgccacgcggcggaggcggctcgtcatcaggactactgtcgtcatcgtggtcgggcttatcaccatcaatgacggacatcacggtctcgctttccgcgcctgcggtattgtcatcatcatttaagctgacaacgtcttcatcataggcggcttcaggctcaaacatggtgcctgcgccattttcacgggcgtaaatcgccagcaccgcagccaaaggcacagaaacctgacggggaacgccgccgaagcgcgcattaaaacgcacttcatcattagacagctccagattacctaccgctcgcggcgcaatattgaggacgatttgcccatcgcgcgcatattccatagggacatgcacgccaggcagcatcacatccaccaccagatgcggggtcaactggttatccagcaaccactcgtagaaagcacgcaacagataaggacgacgcggcgtcaactgtgacaaatccatacaggttaaccccgaccgaggcgcatttcacgttcagcttcggttaaagaagccaggaaagaatcacgttcaaagacgcgggtcatatagcctttcagctctttcgcccctgcgccgctgaattcaatacccaactgcggtaaacgccacaggagaggcgccaggtagcaatcaaccaggctgaattcgtcgctcaggaaatacggtttctgaccaaatactggcgcaatcgccagcagctcttcacgcagttgtttacgtgcagagtcggcctcggaagcagacccgtttacgatgacgttcatcagcgtataccagtctttttcaatacggtgcatgtacagacggctttcaccgcgcgcgaccggataaaccggcatcagcggcggatgagggaaacgctcatccagatattccataatgatgcgagattcccacagggtcagctcacgatccaccagtgtcggaacgctttgattcgggttgaggtcaatcagatcctgaggtggattgtccttttccacatgttcgatctcaaaactaacacccttttcagccaacacaatgcggacctgatggctatagatgtcagtaggaccagaaaacagcgtcattaccgaacgtttgttggcagcgacagccatgaaaacctccaggtatattcagaatttttactgctaccagccacaatgtgaccagccagatgttatgtcacccagggcgaaaaaagccatcattgctcagaaacgagacaaaaaatgaacattccccgctatttgggcagaaaattggatgatagtttaccagattttgtgacctttgtggtgagtcgattctggaaatgaggaaaaagagatattcctggtctgaaatgctcgccccacctgagatattgtctttcgcctgttatgcctgtactaccggtgcgccccagccatcaaaactgccgccatgtttttcagccagatcggtaagctggcaagtgatttctgtcatatgccattgttgcggagcatcggtgctgataaaagacgccataaacccctgttgcgggtcattcattcgaatactgaccagcgttatgccatacggtaatgcagcaatatcttgcgccaggtcgcgcgctgcgacctctgtaggcaatgtcgcataataatcaatagcgcgcggaagcgtcagatcatcaccttgttcctgtaatccccggcacacacgggaatcgtgtatccagttccagtcgtatcgggttggatacaagaactggcggtaaaagtttcctttatcattgtgactctctctataactaaaagagatttccgggccaccagcgagcaatttatccagcgtcttttcccagttaagatcctcttccgacatgaacacaaaatcgcgccagccttgttgggtaaccacacccaccagccagatcggaaacgtcttccccttttcatcaagccagtcctctatacgatttaaactctgtgtttcatcgggctgcggtaaaccattttcataacagttggtgtaatgaacacgtaagaacccggtatggataaggcgatcaaatttttcatcctgaatggcgccgatatccacacgtatacccgtaacatggtcatccaccgttgttataaagaattcccatttattcgacagcattaacgactctttcttagtaaacaatgagttaaaaaatcccactgtgacttccttttctctgagcgtgcatgaaaaatgaataagatgagaataatgctaaagatagggaggaaaagagactggattcggactttagccataaaaaaacccgccgaagcgggttttttcgctaacagttgtctgccgaagcagaaccccattaacgtttggagaactgcggacgacgacgtgctttacgcaggccgactttcttacgttcaacctgacgagcgtcacgagtaacgaagccagctttacgcagttcgccacgcagggactcgtcgtactccatcagagcgcgggtgataccgtgacggatcgcaccagcctgaccagagataccaccacctttaacagtgatgtacagatccagtttctcaaccatgtcgaccagttccagcggctgacgaactaccatgcgggcagtttcacgaccgaagtactgttccagagaacgttggttgataacgattttaccgttgcccggtttgatgaacacgcgagctgcggaacttttgcggcgaccagtgccgtagtattgattttcagccattgcctataatcccgattagatgtcaagaacttgcggttgctgtgccgcgtggttgtgctcgttgcccgcgtaaactttcagtttacggaacatagcacgacccagcgggccttttggcagcatgcctttaaccgcgatttcaatcacacgctcaggacggcgggcaatcatctcttcaaaggtcgcttgtttgataccaccgatgtggccggtgtggtgatagtacactttgtcagtacgcttgttgccggttacagcaactttgtcagcgttcagaacgatgatgtaatcaccggtatctacgtgcggagtgtattccgctttgtgcttaccgcgcaggcgacgagccagttcagtagccagacggcccagagttttaccggtcgcgtcaacaacataccagtcgcgttttacggtttctggtttagctgtaaaagttttcattaaaagcttacccaaataaataagttacacgttggtgaacacccaaacgttttaaatagttgaggttcacacgacaaagtccggtaaacctaccccctcggatatgtttggccggcacagagaaagtttgggaaaaaactctcttgtaacgtggggtcgcaggattatagagaagtccaggtcaaagatcgacccctttttgcgatttgccgcgggttttgttcaggcctggttcaccctccggtcggggaggttgcacagatataataccgcataatgccggagcgctgcgcttgtccggcttacggcatatgctcccgcttgagatactccgcactctgcatctcttgcaggcgcgacagacagcgctgaaattcaaacttgagccgctccccctgataaatttcatataacggcgcggcagcgctgaccaccagcttaacgtggcgctcgtaaaactcatccaccagcgcaataaagcggcgcgcttcgttctccatcagcggcgtcatgaccggcacgtcaaacagcagaaccgtgtgaaataaccttgagagcgcaatgtaatcatgctggctgcgggcctcgacgcacagcgtagcgaaagagaccgctagcgtttggttttcaacgcccagggtggataaagagcgatgattgatttccagcgtcggagcgtgctcgcgcgcggcccccgctaacgccagccacagtttatccatttgccgccgggtttcatcattaagcggcgttagccataaatgggcctgcgtcagcgtccgcagccggtaatcgacgccggcgtccacattcataatgtcgcagtgctgtttaatggcatcgatagccggcaggaagcgggcgcgttgcaaaccgttgcggtagagttcatccggcggaatattggaggtcgcgaccagcgtaatgccgcgtgcaaacagcgctttcattaaaccgcccagcagcatggcgtcggtaatatcggtgacgaaaaactcatcgaaacacagtacgtccgtctcggttttaaaccgatcggcaataatgtctaacggatcgatctgtccctgtaacgcggtaagctcttcatgcacgcgcagcataaaccgatgaaaatgcaggcgtagttttcgctcgcccggcaggctgtggtagaagagatccatgagccaggttttgccgcgacccacgcccccccacatatacagcccgcgaaccggtatttgcgcgtccggttcgtttttgcctaataatttccccagtcgcgctatcagaccgccgggtggcgtagccgacgattttttcgcggtgagcgcctgataaagggtttccagacggtcgaccgcctctttctgtacgtcgtcaggctgatgggtgccttcgttgagtgcctggagataacgcgatgtaggggaaaggctttgcataatgttattgttattccttgaaaatcgatgtgccgtcgttcacggctgacgaaaaaaaggccgttctacactacgcgatatgctgtcgggattccacttctacggaattagcggttatagtggcataatcaggcgcgggcatggagcctggagccaacaccctacggaaacataagacaacgggagatgttcatgacctgggaatatgcgctaattggattagtcgtcggtatcatcattggtgccgtggccatgcgttttggtaatcgtaagttacgtcaacagcaggcattgcagtacgaactggaaaaaaacaaagctgagctggaagagtaccgtgaagagctggttagccactttgcccgcagcgcggaactgctggataccatggcgcatgattaccgccagctgtatcagcatatggcgaaaagctccagcagcctgctgccggaaatgtctgcggagtcgaatccgttccgtaaccgtctggcggagtctgaggcgagcaacgatcaggcgccagtacaaatgccacgtgattattctgaaggcgcgtctggcctgttacgtagcggcgcaaagcgcgattaatcgcacgccgttaagaaatttatcgggcgcatcgcttgcgccctctctctatctttcctgtcccagctattatcattgttaccaggctgaaaattcaataacatcaatctgttttgaattgtctatccgttcattcaaggtacgagagcagcatccatgaaaaaacacacccagctgttaagtgcattagcgttaagtgtcgggttaactctttcggcgccgtttccagcccttgcatcgataccaggccaggtgccaggccaggcgacgctgccaagccttgcccctatgctggagaaagtgctgcctgctgtcgtcagcgtaaaagtcgagggaaccgccgcccagagccaaaaagtgccggaggagtttaaaaaattctttggcgaggatctgccagaccagccgtcccagccgtttgaaggactcggttcgggggtgattatcgatgccgcgaaaggctatgtattaaccaataatcatgtgattaatcaggcacagaagatcagcattcaactgaatgacggacgcgaattcgacgcgaagcagatcggcggcgacgaccagagcgatatcgctctgttacaaattcagaatcccagcaagttaacgcaaattgccatcgccgattccgacaaactccgcgtcggcgatttcgccgtggcggtcggtaatccgtttggtcttggacaaaccgccacctccgggattatttcagcgctgggacgcagcgggcttaatctggaagggcttgagaactttattcaaaccgatgcctctattaaccgcggcaactccggcggcgcgctgcttaacctgaacggcgagctgatcgggattaataccgcgatcctcgcgccagggggcgggagcatcggcattggctttgctattccttccaatatggcgcagacgctggcgcagcagttgattcagttcggcgaaatcaaacgcggattgctgggaattaaaggcactgaaatgaccgctgatatcgccaaggcattcaaactgaacgttcagcgtggcgcttttgtcagcgaggttttacccaattcaggttcggcgaaggccggggtgaaatccggagacgtgattatcagtcttaacggtaagcagctgaatagctttgccgaactgcgttcacgtatcgccaccaccgaaccgggcacgaaagtgaagctgggcctgctgcgcgatggtaagccgctggaggtggaagtcacgctggattccaatacctcttcttccgccagcgccgaaatgatcgccccggcgttgcaaggcgcaacgttgagcgacggccaactgaaagacgggacgaaaggcgttaaggttgatagcgtcgaaaaaagcagtcctgccgcgcaggccggtttgcaaaaagatgatgttatcatcggcgttaatcgcgatcgcatcagttctatcgccgaaatgcgcaaagtgatggcggcaaaaccgtccatcattgctcttcaggtagtacgcggcaacgagaacatttatctattgctgcgctaatcctgtcttaaaccgggcatcagcctgcgatgtgatgtccggttaactcatggtatgctgctgccgttcccttttttaacgacgcctccatcatgtttgtgaagctcttacgttcggtcgcaataggtttaattgtcggcgctattctgttggccgtgatgccttctttgcgcaaaattaatcctatcgccgtcccgcaattcgacagtaccgatgagacgccagccagttataattttgcggttcgccgcgccgcgcctgccgtcgtcaatgtctataaccgcagtatgaacagtaccgcgcataatcaactggagatccgcacgctgggttccggcgtgatcatggatcaacgcggttatattattaccaacaaacacgtgattaacgatgccgatcagattatcgtcgcgctacaggatggccgcgtctttgaagcgctactggttggctccgattcgcttaccgatctggcggtgctgaagatcaacgccactggcgggctgcctaccatcccgattaatacaaagcgtacaccgcatattggcgacgtcgtactggctatcggcaacccatataatctgggacagaccatcacccaggggatcatcagcgcaacgggtcgtatcggcctgaacccgacggggcgacagaattttctccagaccgacgcctcgattaaccacggtaattccggcggcgcgctggtcaactcgttaggcgaactgatggggatcaacaccctctcttttgataagagtaacgatggcgaaacgccggaaggccttggttttgcgattcccttccagctagccacgaaaattatggataagcttatccgcgacggtcgcgtgattcgcggctatatcggtattggcggacgagaaatcgcgccgctgcacgcgcagcagggtagcggcatggacccgattcagggcattgtcgttaatgaagtgacgccaaacggccccgccgcgcttgccggtattcaggttaatgatttgattatttcggtcaataataaacccgccgtgtccgcgctggagacgatggatcaggtggcggaaatccgcccgggctccgtcattccggtcgtggtaatgcgggatgataagcagctcacgttccaggtgacggtgcaggaatacccggcgtcgaactaaaacgacgcggcttttgcccgcgtcgttcgacgactagtcaataaagactggccctgccggaaaatgcgccaggaaactcgtgaagatcagcagagcggggagacttttctccccgacggcttcttcacgcagcgccttatccagtacaagcaggctatgctcccccccttcccccaaaatgccgcccatccagagcagtcgttgcgcctgttgacgcgcatactgcgatgcgcttttccaggcgaccagatgcagcaacgtttgtaacagcaggacccgagacgcgtgaccatcgcgttgcaatcgcctgaatacgggtaatgcaatactacgtaccgtcgagaaaccgctcgccgcctccccctcaatcggcgataaaccaacagccgcctgtttgacgaaatcgcataactgattgtgtgttaatggccgctcgcctgcgctcatataccctgcggcaaaacagagtaacccgataccctgagcccaatcggttgatggcagaatcccctgcggaacattcggtgccgacgtctgtgcggcacaaagcccctcgtcgtaacactgtgcaaaacgttgctcatatattgctgagttgacgccagaccacggcagtaaatgcagcgctggctcaagctcagttatctgattcaccgtctcaacaacataatgcaagatggtttctctggatggcatggatgtaccttgccgaaacgcaaccatttcactcattactgtgtcctcattttgcgggaacagaatcactgctcccgattagattggattacatcgccagcacgtacttgagcatcacgcccgccgcaatggccgagccaatcaccccggccacgttcggccccatcgcgtgcatcagcaggaagttctgcgcgtctgattccaggcccactttgttcgatacgcgtgccgccatcggcaccgccgacacccccgccgaaccgataagcgggttgattttgttcttactgcacaggttcagcagcttcgccatcagcaccccggccgccgtcccaatcccgaacgcaatcacacccagcagcagaatgcccagcgtctgcggctgcaggaacttgtccgcgaccagcttcgcgcccaccgacagcccgaggaagatggtgacgatattaatcagcccgttctgtaccgtgtcgctcagacgctccaccacgccgctttcgcgcatcaggttgccaaaacagaacatccccagcagcggcgccgcgtccggcagcagcagggccaccagcatgagcagcaccaccgggaagaggattttttcccgcttactcaccgtgcgcagctgcaccatgcggattttccgctccgtctcgctggtcagcgccttcataatcggcggctggattaacggcaccagcgccatatacgagtacgccgccaccgcgatggcccccagcagctccggcgccagcttgcccgacagataaatcgccgtcgggccgtccgcgccgccgataatgccgatggccgccgcctgcggcagggtgaagctgataaggccgaagtagttcagcgtcagcgcccccagcacggtggcgaagataccgaactgcgccgccgcgccgagcagcagggtgcgcgggttggccagcagcgggccgaagtcggtcatcgcgccgacgcccatgaagatgaccagcggcgcgacaccggagccaatcgccactttgtagaacagcgccagcacccccggcgtgtagcccatgtccaccgccagattttccatctggttctggacggagggcagcgccagcgctaatgcttccttaatggcatgcacgtccggcgcgcagtggagcttcgcggcaatcaccgccagctgtccggcgtcgtggtgcgccagcaggctttccagcgcggtcagcgccagcccggcctccggaatgttcgacagcagcccgccgaagcctatcggcagcagcagtaacggctcgaacttcttcgcaatcgccagccacagcagcagcaggctgaccagcagcatgatggcctggcctgcgccaaggtgcatcagccccatgccctgaagcagggcgttcagactttccatttcagttctccgttacgccagcgtcatcagggtgtcgccgacggagaccgcgtccccggacttcaccgcgataccgcgtaccgtcccggcctgcgcggcgcggatttcggtttccatcttcatggcttccagaatcagcagcacgtcgccttcggccaccgtctggccctcggtggcaatcaccttccagatattccccgccagcggcgcggtgaccggggtgccggcgcctgccggggcggcagcctgaaccggtgcggaagaggccgccggaacagccgcagtgagctggctgatatcgccgccgtcgctgaccttcaccacaaaggctttgccttccacttccacggtgtagataccggaggcggcaggcttctctgcttttgccaccggctgcgcggcttccgcctgcggcagtggctcaaacgccgccgggttattgcggttctcaaggaatttgaggccgatttgcgggaacagcgccacggtgagcacgtcgtcgatggcgtttcccgccagagtaatccccttctcctgcgcctggcgcctgacgtccgcttccagttcagccagctccggtttgagtaaatccgccggacggcaggtcaccggggcgcccccttccagcacgcgggcctgtaacgcggcgttcaccggcaccggggtgtggccgtattcgcctttcagaatgcccgccgtttctttggcaatggttttgtagcgctcgccggtcaggacgttgagcaccgcctgggtgccgacaatctgcgaggttggggtcaccagcgggataaagccgaggtcctcgcgcacgcgggggatttccgccagcacctggtcgagtttgtccgccgcgttctgctgcttcagctggctttcgaggttggtgagcattccgcccggtacctgggccaccagaatacggctgtcgtagcccttcagctggccttcaaaggcgtgatactttttgcgcacctcgcggaagtacgcggcgatattttccagcttcaggatatccagcccggtgtcgtgttccgtgccggcaagcgttgccaccagcgcttcggtggccgggtggccgtaggtggcgctcatggaggaaatcgccgtgtccacgccgtcgacgcccgcctcgatagccttcagcagggccatctccgccatcccggtggtggcgtgacagtgcaggtgcaggcgcacctcaaaacgttttttgatttcgctgaccagctcatacgccgccatcggtgtgagaatgccggacatatccttgatggcaatcgagtcaacgccggtttccagcagttgctccgttaaatccagccaggtctgcagggtgtgcgccgggctggtggtgtaactcagggtcccctgggcgtgcgcgccgtggctgcgcaccgcctgtaatgcggctttcatattgcgcgggtcgttcatggcatcgaagacgcggaacacatccatgccgtttttcaccgcgcgttcgacgaagcgctccaccacgtcatcggcgtagtggcggtagccgagcaggttctggccgcgcagcaacatctgcagcggggttttgggcatggcttttttgagttcgcgcaggcgcagccacgggtcttcgccgagaaagcggatacaggcgtcaaaggtggcgccgccccagcactccagcgacccgtagcccacgtcatcgagcgcggcggcaatcggcagcatgtcatcaaggcgcaggcgggtggcgaacagagactggtgagcgtcacgcaggacgacatcggtaatggcaatggtcatggatccctccgggaattaagcattaaggcggtgatggtggtggatagcggcggcaatgaccggctttaagcgggtgaagtcgtccacgacgggcgcggcggcggcaggtgccgccttcggcgccggagccggttcagggaagaagcggttgacggcggcggacatgccgcggatggcgaaaatcagcaggaacagaaacgccagcacgaaccccatgccgaggaacatcagggtgaagccttcacctaatagcagagctgcattagtcataaaatagccttcaggcaggaggcacgataatggggctatttatgacgatgaaataataagggtggatttccctgagccgccccggccagagcccttggttattattatcgtcataacgtattaccaccattatcgtgcaatttacgtaatcaggtttatttgatgaaacttacgttctggcatatttcatcagcgacgatctctttacgctgattaaaaataattttgttctgttcaaacagattattcccatgggtatcaatagaaacaatcagcgggccaaactctttaacccgacagacccacagcgtttccggcatccccagatcgcgccattgggcatcttcaatttcttccacgcacacggcggctacaaccgcacaaccggcagggaatacgcagtgcagcgctttgtgttcagcacagccctcttcggtacctttacccataccgcctttacccacaattaatttcacgccagtctgcgcaataaactctttttcgaatttctccatacgcatgctggtggttgggccaacggagaccatttcaaacttatcgtcttcgcctttaattgggcggacaatggggccagcgtgtaaaatagcgccgccgcgaacatctaccggaagttcgcgaccaccttcaattaaacggcgatgggctacgtcacggcaggtaacaatatgaccgttgagataaataatatcgccagccttaatatccgctaaatcttcatctttaattggcgtagtcaggatttttttagtcatcagaaattcactccgctgtgagacgtaatggtgtaattcaaatctttatcgaaaacgatatgccctttacggtgcgaccagcagccgacgtttaccgccacgccgatggtagaaggatgacgcgcggtgttttcaatgttcacgcccataacggaggtattaccggacatcccctgcggccccaggccaattttgttaatgccgtcttccagcattttttccagcgaggctgcacgctcattctcgttatgcgaaccgatcggacgcatcagcgcttttttcgatagcagtgccgccgtttcaacagaggtcgctacgcccacgccaaccagcagcggcggacaagcgttgaggccgtagctggtcatcacatccagtacaaagcgggtcacaccttcatagcctgcacccggcatcagcaccatcgctttccccggcagagaacaaccaccgcccgccatataggtataaatgctgcactgatcggaattgggaacgatttcccagaagaccgtcggcgtacctttacccacgtttttaccggtgttgtattcatcaaaagtttctacgctgttgtggcgcagcggagaatctacagttgctttgatcaccgcctcacgcaacaacgcttccagctcgccaatcagcggaaagttcgtcccgcactccaccagaaactgaatgacaccggtgtcctggcaggaaggtcgatccagctctttcgccagacgctggttctcaatcatggtagtaaagatgacgtcggccagtttactggtctctttcttatgcaaatcttccagttttgcagtgacatcatcaggcaaaactttgccggtatatcccacaaacttggccataacgtcggtcatatgggatatctgttcacttttgctcataaatgctccttagtcagaacagcttccgttaattacggatgaaaagggaaaaggattggcagcaggatcaagctgacaatggttgaaacgataatcagggggataccggccttagcgtagtcgacaaatttatagccacccgcggagagcaccatcatgttggcaggcataccgataggggttgcgtaggcgcaggaaccgccaatgaccgtcgccatcagaaccgcacgcgggtcggcccccatgcctgcggcaatggacaaactcaccggcaccaatagcgctgtcgttgcggtattggacataaagttggtcatcacaacggataaggcgaaaacggcgatcagcaacatgaacggtgaggagttttgccccagcatgccgattacatagtccgcaaccagcttgcctgccccggtcatttccagcgcttttgccagcgccagggtgccgccaaagataaaaatagtctgtgaatcaatagctttataggcctgtttttccgtgagtacgccgcttactaccagcacaagagcgccaatacaaccggtcacggccaggctgacaccgatcttcttctcaaagatcatgccgaggatcgttgcgatcaacaccacgagtgagagccgttgtttccactgtggaacatggctgtagtcacgttgcaccccgacgctccccacctcaccgccggtcgcattattcggcagaaagcgatagccaatagtcaggaagtagagaatgccgcagatgagcatcgggagaccgatttttgcgtattcaaaaaagccaaagccgccgccaatattctgtagcgcagactgcgcgataagatttcccggcgcgccaattaacgacaggttaccgcccaacgcagcggcaaaaaccagcggcatcagtagacgagaacgcgagaagcccgattttgccgccacgccgatcaccaccggaatcaaaaccgcagcggtaccggtgttagagaggacgccagacatcaaacccaccaccaccataatggtgaagatcagctgtttttctgttttcgcgaagcgcgtgatgacgccgcccactttgtttgccataccggtctcgaacaacgcaccgcccacgataaacatcgcgacaaagaggatgacgttagtgtcgataaagccagcaaaggcctgtttgatattcagaacgccggtgataactaaggccacgcagacaatcatggaagtgacggccagtggcactttttcccatacaaacatgacgatagcgaacaccaataaacataaggtaagggtaatgggttccatatttataattatccaatcaatgatatatgatattgtatccaatgttggcagggagaaattattcccatacaaaaactaagtcaaatcgtttctcaggaaagatgcaggagtgggatctacatcaagatcgtggttagatcgttactggacgtgattaatagaattgaagaattggttgaagcgcctgcgatgctcacgcaggcgaaaagatcaggcagaagggtcaccaacatagcgggtcagcatattctccattgagcgaataatgtgttcgcgcatgcgctggcgtgccaatgtttcatcatgaagttcaagagcttgcagaatacttttatgttcctgaatggaaatcacggcatactcttcttcggtgaccttatggcccatcgacaggccgttccacatattacagagcaacattttcattttttcgttgccagcaacattccatatttccatatgaaatgcctgattcaggtcggagtattccgccgagttattttccgcgagagccttttcagcggcataatgcacctgggctatccgcgagatatcggagccaggacgagaagctttagccaccgcctcactttctaacagcgcgcgaatttcatagtgttcacggatcgtttgttcattgatgcccaacaccaccgcccctttattagggcgcacttttatcagcccatccgccgccagaatctgaaacgcctcgcgcactggcatactggacacgccgaccattccggcaatgccttctaacgtaatctcctgcccttccactaactccctcgaaagaatcgctttacgcagcactgccgcgacctgttctttcgctgaaagaagcttaatcttccctaacttaggcttctgcactttcccaatccttcatatgttgacgcattatttctgctaaagagaggaaataacgctgcataacttgcccaatctcatcacgccgcccctggcgtatgacgtcagccagttcagcgaaaagctgcgccgactcctgattatcttttttcagatgcaaaataacataagagacataaccgtccaggaactgctgatacaccttttccagatagcggttattcacataagaaatcagcatcgcatgacactccagttcgcaggatttgtcttctgcgacagccagcgcttgcgcacgtatcaggagggcatcgcctacttcgctgggtatcagcgaaaacatttcggcggccatcgcggcaatcacgcgaaaaatatgactcacgcgatcggcctcaagatgcgcgacctgcatgtgcctgttgggcagtcggattaaaaaaccttcctgttcgagtgactgtagcgcttctcgaaccggcattcgtgaaagaccgagctgctccgcaatactttcctgcgcgagttcttctcccgcttttatattgccggaaagaatttcatagcgaagcatttgcgtaatgtgatcgcgggtttgcgttctttggatctttttcacgacgttctcgttaataaccgataagacgtgaggagtttagcagatttagtgcttgatttcgtggcttgtttacagtcaaagaagccggagcaaaagccccggcatcgggcaggaacagcttatttattaataaaatcttcacccaactgaatatcttttttcagcgtatccagcatagcgtccagcgaatgttgctcgaaagcgctcagtgtgccgatggatttacgctcttctacgccgtttttacccagcagcagcggctgagagaagaaacgggcatactgaccgtcgccttccacataggcgcattccaccacgcccttctcgccctgcagagcgcgaaccagagaaagaccgaaacgcgcggcagcctggcccatagagagggttgccgatccgccgccggctttcgcctcgacgacttcagtaccggcgttctgaatacgtttagtcagctcggccgcttcttgttcggtaaaacttacgcctggaatctgcgacagcagcggcagaatcgtcacgccggagtgcccgccaatcaccggcacttcaacttccgttggcagcttacctttcagctctgcaacaaaggtattagagcggatgatatccagcgtggtaacgccaaacagtttgtttttgtcgtatacgcctgcttttttcagcacttccgccgcaatcgcaacggtggtgttcaccgggttggtgataatgcccacgcacgctttcgggcaggttttagcgatctgctgcaccaggtttttcacgatgccggcgttaacgttaaacaggtcggaacggtccatacccggcttacgcgccacacccgcagaaatcagtactacgtcagcgccttcaagcgccggggttgcgtcttcaccggagaaacctttgatttttacagcggtggggatgtggctcaaatcaacggccacaccgggagtcactggagcgatgtcgtacagggagagttctgaacctgaaggcagttggttttttaaaagtaatgccagcgcctgaccgataccaccagcagcgccgaggactgcgactttcatcctaaactccttattatatgattagctaagtgtctattgctccgcggcggcgaccttaattcacaaattcaatgattacaatcctcactcatcaagaatgcggagtcgcgcaattttggcttttatgcatttaatttgcgtaatccggatcggctgcaaccagagagcaacgttctacaggtggtgacaatataccctactaccctctcaaaacaacatcattttgataacaattaatttacttttaatcttatttgcgaggcgtgacacaggcatgtttcttgataacgaaatttgataaaattccgctctttcataacattatttcagccttaaacaaggcagactgtttgcataaaaattcatctgtatgcacaataatgttgtttctaccgccatattacgggtgacttatgcgaagctcggctaaacaagaagaactagtaagagcgtttaaagcgctcctcaaagaagaaaaattcagctcacagggcgaaatcgtcctcgcgttgcaggatcagggctttgaaaatatcaatcagtccaaggtctcgcgcatgttgactaaattcggcgcagtgcgtacacgtaacgcaaaaatggaaatggtgtactgtcttccggctgaactgggcgtcccaacaacatccagtccgttgaaaaatctggtgctggatatcgactataacgacgctgtcgtggtgattcataccagccccggcgcggcacaactcattgcacgcctgctggattcactggggaaagcagaaggtattctcggcacgattgccggcgacgatactatcttcactacgcctgccagcggcttttccgtaagagatctgtacgaagccattctggaactttttgaacaagagctttagtcccacttcctccgtcgtcgtacggcggaggcacctttttgtcctctcccctcgccgctttcctgtacgcctatcatttggcaaatcatgcccttaaacattcaccacatgaatgataaatcaaaaaaacgcacaaaatgtcaaatttattaagcaattgattttcttttattttttaaacgacagcggcgaaaaacagcaattttaattccataacgttataaaaaataaaatttttaatgtttttaaaaagcagaaacaattagcgtggtattaattaatcgcgtgattagtgtatacttaattttgtgatgagggtcacgaaacaaagtccccagtaaaggaattcgacgaggtaaaaatcatgaaaatcaaaaccactgttgcaacattaagtattctgtccgttctctcttttggcgctttcgccgcagaacctatcagcgcagagcaagcgcaaaaccgtgaagcaatcggatcggtttcagtcagcgctatcggctcatcgcctatggatatgaacgccatgctgagcaaaaaagcggatgaacaaggcgctacggcctaccacattaccgaagcgcgtagcggcagcaactggcacgccactgccgaactgtacaaataaaattcacctgccatcgcatataacgtgtccttgcttcgcggagatatcgcataagaaaagcccattaatccgcgaggttgaccctataaaggaataaaagatcatgaaaacgaaatacattatcgcatcactcggcctggccactctgctctctttcggcgcaaatgccgcagtacatcaggtcaacgcggaacaggcgcagaatctgcaaccgatgggcaccatttccgtctcgcagattggtagtacgccaatggatatgcgccaggagatcgtcgctaaagctgaaaaagcaggcgctaatagctatcgcatcatcgaattaaaagaaggtgataactggcacgccaccgccgagttgtataagtaaaccctcgtcgtctaacccgacgacttgcccccgcctgccgggggcttttttatgctttttcaatgccggacattaaaccgtagccgcccctccagctcttcttccgcttcatcaaagagtaaaatcagcgccccgtagcgcctgcgcagtttatcaggcaggtgaacgaactcaatctctagcggtaggggtaagatatcgctcattaccgcatcccataatgtatcaagatcgcttactttctcactggcaagaccaaacgtctgcgtaaactcgcgataaaaatcgctttggtttttaatatcattaaaatcaaaagtatagacattcatagccagccaccatccccgacagacaattgtctgttttactactaagcatcattatgcagaggtttcacttccagaaacgcttttagccccggagcactcttgcgctgtttttgtatctcaaataagtatagtcataaaaaaaccgacgcttttggcatcggttcttgtgggttagctatcggtaagcgcgttctggtatttatgtaacatacccgtcaggcgtttaaccggttccgtcacctgcggcggcgcctcccagatacgtaatttctcctgatagatatccagctcatccagcaactgaccaaagtagcgtcgccgtttatcatcgcttccggcggaaataacatggtctgcggtacgacgaagctgacggtggaacactgacagatcttcattaaccggtatcggcgcgtcgcgcagacgttgatgagcaatgatcatcgttagcgccaggcggaacttcggcaaatcgccaggaaatttattcatcagcaaaaagagttgctgatataacgcaggcagacggttttctttacggcgtaccacgttggtcgtcattgccgagaccgcagcggaaacaaactgattaagcagcacgcgaccggttcgatctttggatttatcacgcaccagcaggatgacgataaacgccagcatacagccgacaatttgccccaacgcgctgtcgaggaactggctgaaatggaacgtcatcggattatccaacacaataatgttaatcgtactggccagcgcccccatcgaccccagacgccgtttctggacctcaatgccgataaagaaccccaataccgccaggctcaaacataacaacagcatactttgctgcgtattgggaataatcaccaggaaatagagcaatcccagcggcaacgccgccagagtgccataaataaaatcgatgcagaccatgcgcggattgggtaaacgcatcgccagcgaggtcaccacggcaatcatcaccatcgcgccattacccgatgtccagccggtccatagccagaataatgtccccagaatgcaggaaagcgtggtgcgccagaagttcaccatcgcatggtgacgttcagcggattccactttaactacgggctcgccttgcaggatctcttcttccgtcgcgctgattttggtgttactgatcacgccgcgtttaagcaatagatagcgcgtcgcagcgcctacccagctataaagcgtgacgggcgtttcgcgctcgccagtccagacaatgacacgccgcatccgttttaactgtctgtggacgtcctgtaccgtttcaaccggcgtctcgaacagttcccggaatgtatcggtaatcagttccggccgcgtgttttgaataagataagtttcacaggattgcgtaatcagcgtgagcgaaagcgtattcaacgctttcaggcggcggttagcgcgtacccagcgcgaagattccatattcagattacttcgcatcccctccagcgccgccgtgcgtcgcaccagatcgccccaggcgttgtcgacttcttcgctgtcgccatgcttaatacaaagctgcattagctgatattgcgctaccagtaaactgtccagttcgcgatcaacctcctgctttatcgatcgcggcgagaaaagcagatccgctaaaatagcgcagccaatgccgataacgatttcgctacagcgctcaagcgcaaattgcggcgtgagcagcggctccgtctgaatggtaatcacaatgatcagcgcagtataacctgacagtccccacgcataagagttttcgatccgtactaaagaggagatccaggtacaaaaaccggcccagacacagcacaccagaatcatcaataacggcgcgcggatcatagagataataatgataagcgcggcgatacagccaataaacgtcccgataatacgcaacattccgcgataacggatagcgccggaatagggttctccgccggcggcaaatgccgggcctgccgccacgatcgcggcggtcagcaccgcccaacgcggcgtctccagttgaaaatggaagccgataaataatgccagcacaatggcgcacgccagctttaccgcaaaacgaatgtgctggttggcaatggagaaaatgcccatgacgattaaccgaattcgcgcagccggtgcgccagtttacggaagaaggagtcctggcttgcgtcacgatcctgcttaccggtgatcacgacggttgccgtcgtaccggcaggccacaaattcccctgctgctcgtcgagccggatgcgcaccggaacacgctgggccagacgcacccattcgaggttagagtctatcgtcgccatccctttcgcatcgctggtactgctggcattcgttacccctgccgccacgctatcgacggtaccttttaatacccggttgctgccaagcggcgtgatttcggcacgatatcccggacgcacgccttccagcttggtctcttccatataggcctgcacgtaaaaagagttctttttcaccagggcgacggccgtggaaccgcgggtaataaattcaccggcataaacattgaggttagtcacccagccgtcagcaggcgcgcgaataacggtgcgctccagatcgagtttagccaggtcgcgcgtcgcctgggctttagccagttgatgcagtaccgtctgcaagacgttgttcgcctgatcgatctcttcccgggacatcgcctgtacgccgaggcgattacggcgaccggcttcctggcgtttttcctgcgccagtacctgataataggctacatcagcttccgcttccgccagcgctttttgatagcgtggctgatcgatggtaaacaggacctgatcctttttcaccagttggttatcatgcacgtttacatgggtaatcaggcccgcgacatccggggcaatagcgacgacatcggcgctaaaacgcgcgtcgcgcgtccagggagattcggtgtaatacacccaggcgcggaaaatggcgataaaggccagaataaccagtacgagggtaatggccgtacgggagagttttcttgttagtgttttcacttcaacctcaaacgaacaggcgcgatattaaataaaacagacaacaatacagcgcggtattgaacagagccggatgccagacaaaatcatagatgcccgtcggcacaagcatccgacgcaccagccaaaaaatagccagtgacaaaagcaattcgaaaaatatcggtgggaaggaaagaccaaacaccacgataacgggaaacagactcatgttgaccttgatttctgagagagagcaggcgatagattgttaagctacatcgccgcagagaagggcaagagacgccaggcgagagcgacatagctcttattcgaataatagtatattaacgtaattgttatgctgttatctatattatgtgatctaaatcacttttaagccagagtgaataatggaacgattaaaacgaatgtcggtattcgccaaagttgtcgagtttggctcttttaccgccgcagccagacagctgcaaatgagcgtatcgtccatcagccagactgtggcgaaactggaagatgagcttcaggttaaattgctcaaccgcagcacacgcagcattgggctcaccgaagctggaaaaatctattatcagggctgtcgtcgtatgctgcatgaagtgcaggatgttcacgagcagctttacgcttttaataacacgcctatcggtacattgcgtatcggctgttcttcaaccatggcgcaaaatgtgctggccgggcttaccgcaaaattattaaaagagtatcccggtctggcggtcaatctggtgacaggaattccggccccggatttaattgccgacgggctggacgtggtgatccgcgtgggcgcgctgcaagactccagcctgttttcccgtcgactcggcgcgatgccgatggttgtgtgcgccgccaagccgtacctcgctcagtacggcgtcccggaaaaacccgccgatctcagtagccattcctggctggaatatagcgtgcgcccggataatgagtttgaacttatcgcgccggaaggaatttctacccgactgattccacaggggcggttcgtcactaacgatccgatgacgctggtacgctggctgaccgccggaaccggaatcgcttatgtgccgctgatgtgggtgatcgatgagatcaatcgtggcgatctggagatcctgctgcctcgctatcagtccgatccccgtccggtgtacgcgctgtacaccgaaaaagataagctgccgcttaaagtgcaggtagtgattaacgcgttaactgactattttgtcgatgtcgcacacctgtttcagggaatgcacgggcgagggaaagaaaaataaaaacaccgggtaattgctgaagacgattgtaggtcagatgccacccgacgcagacattgcctgatggcgctgcgcttatcaggcctgggcggcacacaccacaggcctgataaggcggacagttatgcggtgccgccaaccgtcaggttatcgactttcagcgtcggctggcctacgcctaccggcagactttgaccctctttaccgcagacccccaccccgttatccagcttaaggtcgttgccgaccatggagatctgttgcatcgtttcaatgcctgatccaatcaacgtcgcgcccttcaccggcgtcgtgactttgccgttttcaatcagatacgcttccgaggtagagaacacaaacttgccggaggtgatatccacctgaccgccgccaaagttaggcgcatagatgccgtattcaacggattcgataatttcctgcggcgttgactgccccgccaacatataggtattcgtcatacgcggcatcggcagatgcgcataagattcgcgacgcccgttaccggtcggcgcagcgcccatcaggcgcgcattcagcttgtcctgcatgtatcctttcagtacgccattttcaatcaatacgttgtactggcctggcgtaccttcatcatcgatagcaacggagccgcgacggttcatcattgtgccgtcatccactacggtgcaaagcgcggaggcaacctgctcgccgatctgaccgctaaatacagacgtcccacgacggttaaaatcaccttccagcccgtgcccgaccgcttcgtgcagcaatacgcccggccacccggcgcccagaaccaccggtaacgtccccgctggcgcagcgaccgcggagagattaaccagcgccatgcgtaccgcttctttcgcccacgcgtcagcgcgaacctcgccgtcgagatcggcaagaaaatactcataaccaaagcgaccgccgccgccgctggcgccgcgctcgcgtttaccgtcttcttccacctgcacgctaacggacaaacgcaccagtggacggacatccgccgccagcgtcccgtcggtcgccgccacgaggattaattcatatacgccggtcaggctggcgttaacttcctgcacgcgtttatcggcttctcgcgccgctttatcaacgcgtctgaggatatccagcttctcttcgcggctcatactttgcagcggatcaagggtggtgtagagcggctgatgcgctacggcggcgagcgtttttaccttgccttcgccgttctcgcgtacaatggttcgcgctgcctgcgcactctgctccagcgccaggaggcttatctgatcagcataagcaaaaccggttttttcgccgctaatggcgcgaacgccaacgccctggtcgatattatatgaaccatctttaatgatgcggtcttctaaaacccaggattcgtgatagctcgactgaaaatagaggtcgccataatcaagacggcgttcggccagttggcccaaaatagcgaacagatcctgatggttcaggccattcgccgctagcaattgttcacttaccaggttcagactcatcgtttttgctactcattgatttctgccggatggcggttcacgccttatccggactacgttgttagattgtgcaaaccggataaacgcagcgccgtccggcatgactatttactgagagtggggcaattcctcgcccccgtcaaatcattgctggctttcttttctcggttggcgcagaacttcgttgatctgcggcgcatcgaccggaccggtaatgcgataacgcagaatggagaccttgctccatagcggccccaacactttactggcggcaaataccgccgcgccgacaatcgggttaacggcaaacgcggcggcgacgcccacggtggcggaaatttccggcgcgacaacggcctccatatcaagacgacgacgcaccagatcaacagaacctttcattgcaatatccgcttccagcccatccaccagcgtatcgtcagtatgtaggacgccatctttaatccacgcggtactatgaatagagtcgaaatagaagccctcgctaaaggtatctctgaagtcaaaccgcagcttacgcagcaacgcatcaaaactgagcagccgcagtagctgtccggcatgaccgctactgagatcagtaaactcgcctttacccagacgcgtgcgtaaaatcccgttgagcgtggcttcatcaggttgccagggcgggtttcgccagtgcagatcgtaatctacgttaaaagacgcgttctggattggcgtcgagataccgaagaacccggcagccgtgtcgaggttactaccatgcagactacctttcagcgaggttcgttcattacccggcgcattcacccactcgccgttcgctttcaaacgggcgaatccggtatcgatcaggccattcgccagagtcagcgtattgcctttgatggcgaaatcgccatcaatacgcccatatttttgcccccatagccagcactcttcgcagcgaagctgtaagtccggccagccacggaagctaatcgtgttcgccgaagccaacggcgatgtcggcgttggtgacgaggcgtgcgtttttgcgacgccagggttgtagtacaggtacttaatgttcgccagccacggcgcatggttgcgcatgagcagcgtggcgttcacctcacggccctgcgcttcaatttttgttccgttcagcgagggggctgaaacgacgctcaaattgttccactgctgaccgcccagcgatagcgcgggagtacgcaacgtgacgcgttgaggaaactcggccgaactgctcacgttatccgccgcgcctttctggaataacgccagccattgcgcgccatccagcgccggcagattgagctcaacgccttgttgagcaggtaatggcggaatcgtccggctgtccgtcgtccagatagcccgatccaacgtcagcttctgatttaataaccagcggctgttaaagtgatttttactccctgcgctccccgttagcgcaaaacttttcaggttgccgtcagcctgaatgttcaccggaatggcttcgcctgcgggtttatttagcggagaaggtaagtgactgctcacatttctcagatcgccattcagctcgatgtgataagtggtgtcagcgtgatacggaagatcgatgccgactttaccattccacgtcacgctgccgctcagggcgtcattcagttgcggcggtaagacgcccatacgcgttggctgccagttaccgttcaggttgacggcgacctgataggcttttgccccttccgtcgtactgaaatccaggttcagcggctgattaaaccagtttgccgtcagcggcccgctttttagcgcgccattcacaaagctgaatttaccgttcagatttttgagcgtgctgtttagcggcttaataaacagactgttattacgcaacgagacatcaccctcagcggtaacctgttcgccatccagcggaatatcaagatgtaagcgagcattcacatcgccatctaactggagctccgccagcgtcgagccaagcgagtcttttagtggcgtctcgtcgaaataaggcccaacggcttttcccggcccgttaatatcggcatcaatgagcagtttctctttggaataatccggaatcgccgccgcgagtttgctggccttcaccccgcccaaatcgacgctatccgaacgcatccacaggccgtcgttcaggaaatccagttcaatgttgagattttttagcgccggccagtcgggttgaaaggcaaacgtcgcattgcgtagcggcaccagcacttcaaactgaccttcgttatgcttatagggaaagaggtgcgggttaccaccgtaaaccaacgtggcgttatccgcctcgccgccctgaattgcgccgctaaggtaatcgaccagcgctttgcccatcaggttttccggaaaatagcgccacgcctgagatccatcgtcggtactgattccggccagaatacccagccacggttcgtcgcccgtcggttgcagatagcggaacccgccgcgcgcgtgtaccgcctttgctttgacgtcaatgtcgcggccatcaagctgaaagccgttctcattcttcaaccaactaagcgtcgcgacgccgttttcaatttccagcggcgcgcgaaaaacggtttcatagggcatcttagcctgctgcatcgcaaccttcatctgcccgtcttctacgcttcccgccagcgtaccggaaaaatgttccgcgccgggcaacagcttccactgtttccaggcaagattttcccacgatgcctgaaaacgcgttttttcggtggcctgtagcggaatatccagcgccagtgtggcgatctttccgctcggctgcgtagcctgccatatttcgcccagcacaggcgacagtttagccgccagcggacgtaatgcttccagccccgccagttcaagattactggcgcgaatgcgtagctcatcgctacgtgtgtgattctcgccgccgacgtcctgctgcgggagccaggccacggttaaggctccgctcggccagggtttaccatcaagcgtaatccgtgtgtccggaatataaaactgccagcccggctgctcacggctaatctgcgccgtcaggttatcgacagacaacgtgtgcgtcgtgttatcgcccaaccagcttgcgccgccctgtttcagccagacgtctcctccggcgatttcacctttactgagcgtcatccagccttccagactgaaacgcgccgtctggagcgccacattatcctgcatccatttgcccagccacggcttgacgtcaatatcgtcggcctgtaaccagactctgccgttatttagcaaaccgtcgtcatcgcgtaaatccatccgcacctgcatcacgccgtgctgcccggtcaggctggagagactgacctcgccttcggcgcggtgccgctctttgccgtttagccaggtaagctgtgggatcgccagctccgcgcgttgtccggaaagcgtcagaaaactgatttggctatcgcgcagatcgaaatgatcgaactgccgcaggaaaagatcgcttaaacggctggtttcgatgccttcgccgtcgctgctttgaagaggcgtgttggtgcggaaattgagttgccagaaggtcaggtcgcgaaactgccagcgcatatgcaacaggctttgccagacgtccagcgccagcgtaacgcgttttatcgacagttcgccgccatctttcagggcggcatgaatattatgcgcttccagcgtagggccaaaattttgccagcttgcggagagttggctggcggccaccggcacgccggtcacagactcaattttattcaggatagccggacgccaggcgtcaagatgaggcaacgccaggcgcagcccgctaaccagcagcgctgcaatgacgatgagcgcggctccagtgagcaataaaatccccggcaatcgcctcacgcgtctctccttgtctgccaaaaaatacgactcacaaccttgctttgccggacggcggcgtgaacgccttatccggcctgcaaatactcgtacgggtcgcggtcttttacatcattacgacgtcaaactgctcctggttataaagcggttcgacctgaactttaacctgtttgccgacaaagatttcgacttccgccagcgcgtgtgattcttcgcctttcagcgcttccgccaccgcaggagaagcataaaccaggaagcgatcggagtcataagcgtgatgaacacgtacaatttcacgcatgatctcatagcagacggtttccaccgtttttaccgtcccgcggccatgacaggttggacattcgttacaaagcacatgttccacgctttcacgagtccgtttacgggtcatttccaccagccccagcggcgaaaaaccgttaatactggttttcacgcgatccttacttaacgcctgttccagcgaatgcagcacccggcggcgatgatcttcattattcatgtcgataaaatcgataatgataatgccgcccagattacgcaggcgtagctggcgggcaatggcctgagtcgcttcaatattggtattaaaaatggtgtcgtcgagattacggtgtccgacaaacgcgccggtattgatatctaccgtcgtcatcgcttcggtttggtcgataatcagataaccgccagacttgagttcaaccttacgctccagcgcgcgctggatctcattttccacgtcataaagatcgaagatcggctgatggccactgtaatgctccagcttactggtcatttccgggatgtattctgcggtaaactccagcagcgactcataggtcagacgtgagtcgacgcgaattcggtccaactgcgcatcggcgaaatcgcgcagcacgcgctgcgccagcgccagttcgccatacatctggtagcgcgtttgcggacgctttttgcgctccattactttcgtccagacgcgcttgagataggcggcgtcagacgcgagatcctcttcacacacgccttccgctgcggtacgaataataaacccgccctgttcgtcgcagtattccgccaccacctttttcaggcgctcgcgttcactttcgctttcgatgcgctgggaaacgccaacgtgtgacgcgccgggcataaaaacaaggtaacgggagggcaacgtgatgtccgtggtcaaacgcgcgcctttcgtgccgagcggatctttcactacctgcaccatcagatcctgtccctgacgcaccagttcggagatatcgcgcacggtaaactgtttttgctcgtcgcccgccacgcattcggtatgcggcataatgtcggaagcgtgaagaaatgcggctttatccagcccaatatctacaaaagccgcctgcatacctggaagtacacgacttacacgacctttgtagatattgcctacgattccgcgtcgcgcttcgcgctcaatatggatttcctgaagaataccgccatcaatgtacgccacgcgcgtttccgatggcgttacgtttaccaacaattcagccgtcatgtttatcccttttatcacgcagtgcgttaaaatgactcaacaactcatacgtttcaaccagcggtaagccgaccacggcgtgatagctgccatttatcttcctgacaaaacagccaccccgcccctgaataccgtatgcacctgctttatctaaaggctcgccgctggcgacatagccagtaatatcctgcgcagaaagcgtgcggaaagtcacctccgttaccaccagacaatccagcgtctgctgcgagtccgcaagcgcaacagcagtcatcacctgatgcgtatttccggaaagcaaacgcagcatttctgcggcatgagcggcgtcgcgcggcttttccagcacctcgccgtttaacacgactatcgtatccgcgcccaacaccggcagatcacggggaaccagcgccacgccagcctgcgccttttcgcgcgccagccgaacaacatactgctgcgcgctttcctgagcacgccgttgctcttcaataccaggcacgacctgctcgaatgaaaatccaagttgagtcaataattcctggcgacgcggggaaccggaagcaagatacagagttgtcatatcgacctttattgcacagcaaactgctggcgtactttacgcatcagcaaaaagagccagggccacagcacgccattgactacactactccagaacacttccggtctgaaagagacgttgatcactaaaaactcggcccagaaaacaataatgtccacggccagtgaaagcaacattaccaccagcgcctgctgccagagcgccaggttacggaagagctggaatttcagagcgaccagataggcgacaatactcatcgacagagcgcgcacgccaagtgtggaaccgctgatgagatcaagtatggcacccatcacaaatcccgtccccacatttacgcggtgcggcagggccagaatccagtacagtaagatgagcaaaacccagtttggccggaaaacaatgatgtcgtccggccagggcatgatttgcagcaacagcgcaataagaaacgagagccagataacccagcgcccctggctacgatagctcgccaccattaccctcccggcgcacgcgcaggcggcgtggtcgcgcccgaaggcgatggttgcgttgataccggcgccgtctggcccgcagatggctgagtaatccccgtcgccgggtccggcactggcgccggcggccccatcgcatccggagaaggcaacacctgcggcatcatctgcatcaggcgctcattggcgacgcggtgaacctcttccggcgtcatcggattggcgccgttacgatcggctccccacaacagcagcagatagcgtaaacgctgcaaacccgcggttggacgtgcctgaatgacggtataggcgcgctgagtgtccagcttgacggaggagaccaccgccaccggatacccttccgggaaacgcccaccaagtccggacgttaccagcacatcgccaacgcgaatatcggtattggcgggcagatgttcaagctgaagatcgtcagtgcagccgttaccggcggcaatcacgcggatgtcattgcgcagtacctgaatcggcagcgcatgagtcgcatcgcaaatcagcagtacgcgactggtcagtttcgccacggcgacaacctgccctacgacgcctttgtcgctaatgaccggttgaccttcatatacgccattaacgctgcctttatcgataacgacctgatcgctgtaaggatcgttaaccgttgaaataacctgagtcaccattttctgctcgtcctgacgcagcggcgaccccagcagctcgcgcaaccgcgcgttctcctgtttgtactgccccagcatcagcaggtcgctgttttttagcagtaattcctggcgcagcgcccgattttccagctcaagctggtcgcgagaagccagcgtttgcgacacgctgtcgagcagttcacgagggccgtttgaaataaaatagaaaggactgacggcagtgtccatgtacgttcggatttgactgaacgtccccaggcggctgtcggcaatgataacgccgagcgccaccagcaccgccagaataaggcgaatctgtagcgacgggccacggctaaaaattggcttcataggctatgcgtattctcgcgtcggagaggcaggacaatccagggataatcctgcccgtatccaactactcttcgctgaacaggtcgccgccgtgcatatcgatcatttccagcgccttgccgccgccgcgcgccacacaggtcagcggatcttcagcaaccacgacaggaatgcccgtctcttccattaacagacggtcaaggttacgcagcagcgcgccgccgccggtgagcaccataccgcgctcggagatgtctgacgccagctccggcggacactgttccagcgccaccattaccgcgctgacgataccggtcaacggttcctgcaacgcttccagaatctcgtttgagttcagggtaaagccgcgtggaacgccttccgccaggttacggccacgcacttcgatctcgcggacttcgtcgcccggataagcggaaccgatttcgtgtttaatacgttctgcggtggcttcaccaatcagagaaccgtagttacgacgaacgtaattaatgatggcttcgtcgaaacggtcaccaccaatacggacagaagaagagtaaaccacgccgttcagggagatcacggcaacttcagtggtaccaccaccgatatccacaaccattgaaccggttgcttcagaaactggcagacctgcgccgatcgcggccgccatcggctcttcgatcaaaaagacttcacgggcgcctgcgccctgagcggattcacgaattgcgcggcgttctacctgcgtcgcgccgaccggcacgcataccagtacgcgcgggcttgggcgcataaagctgttgctgtgcacttgtttaataaagtgctggagcattttttcggtcacaaagaagtcagcgataacgccgtctttcatcggacggatcgcagcgatattgcccggcgtacggcccagcatctgcttcgcatcatgaccgactgcagccacgcttttcggcgaaccggcacgatcctgacgaatggccacaacggaaggctcattcaatacgatgccttgtccttttacataaatgagggtattcgcggtacccaggtcaatggacaggtcattggaaaacatgccacgaaattttttcaacatactaagggataatcctgaaagctggggcggaaaacaaaatccgcttactttaccaaccacacgcagcagcgacaaggcgcaaaaatcatctgctacggtgaaaattagtgcagttcgtttcctttgttacaaatctcggcctgagtccctcagggctgaaaaaatcagcagcaatcctcgccttcgtttgcaacctgtcaaaggtcattcacctgcatatttgctgcaacaatctggcgagcagacaagcacacccccatgaggcgcagcgcgcgttattctacgtgaaaacaaattaaacggcaggttaaaccgagtatctttgcgaatattttttcacgtttgtgtcaagtagttgggaggaggcaaaaaaatcaccctgcccgccagccacgccgcgttttgtcagcgtctgccactcgccgcgcgaacggacgcctgtcgcgtaaacctgcgtaggcgtgcccgcgcaggcctctaccagactttgaaccagaagctggttttccgttcgcttctcaatgtttctgaccagactcggatgcagcttgagtaattccacattgagcgctttaatccagctcgtgctaaccagcgtcaaacccgcctgtgtcaccgccacccgaacgccaagcgcattgactaagcgaaggatgggttgtaaccgactgatgtgttgacaaacatctgcctccgcaagttcaataattatgcgatttcgctgtgatttttcacactgcattaacgtatcgcgcaaccagcgctgaaaacgcggacgaatcagcgactcaaccgtcaactgcattgccagattttcatccggccagtagcccagcaacgtaatcaggcggctaatttgtaatctgtcatactcttccgataaaccaaattgcagcaccatcggcatatactccgccgagctcacctcttctttaccgtcatagatgcgacacatcaattcccgatgatgtacgcgaccttctcgcgtgaccgctggtttttgataaagtcgcggtccaccccggttcagcatctgctcaatcaatgtgcgccagcgcacattgccgcgccctttttccggcagagtgtcgtcgtagatagcccagctatttcccccctgcagggcggcattccgcgccgcggcttcagcatgttccatcacctgctcggtggactgtccgctgcgccaggcgcaaatgccgatatgtaccatatcgtcacgatcgagcattttgttagccggtagcgcatcgacagcttttaaaagttgtccggcaatactttccgcttctttcagcgttcgatgcggtagcagcacggcaaagtcgctgcggtgataacgcgccagcagcgagccagggtaacgcataataaatgtcgatagcagattgataagcataaacatctgctcttccgcctgattgcctcccaggctgtcgcgcagaagattgaagtctggcaagcggatcatcatcaccacgccatgcactcccactttttcctgatcttccagcagcgtcgccagttggttatcaaagaacagacggttaccgagtccggttttggtgtcctgcgcggcgtaggagcgaatgagggtgtccaggcggctacgctgttcgtgagcaaactgaatttcggaaagcaatacatcaagcgcgctactggtgcgcgctggccattcgtaaacagaaccgcggacattcgccccgcgttcgccgttcagaatacgcgttgagcgaatttccagaagctcttgcccggaaagctgccgctgcagccagcgcaccgataaaaacaaaatcagaacgataaaaccgatcgccagcgttagcggcgccgtggtgatcagtgagtgaaaatagttacccatcgggtcctgataagccagacgtagcgacattcctggatgttttatcagcggtacgaccagctcgcgatacatgtcgctggtgccggctggccgataacctctggcacgagaatggctgtagacgctgcgctccccctgcaacagatcgacacgcacaatatcggaagcgatcatgagttcgtcgatttgcggcgtcagcgagacaatatcatgggtcaccaggtgcgtatcaatggctgtcgccgtcgcctgcacacggctgacatacttatactgtacggcgttataaaagcttagcgagcaacctatcagagtcacgaagatcgttaaccccgtgagcagcgtgataaaagctgagaatttcgtcgttaatcgcatccttgagttaactccgacggttataaacagtatgaaaaagcgaatctgaaggcggaattcgccacggcgcgcaatgaagcaggcatactaccaaaatggatctatctggcaatttattgcgttgcatcggcatcacgttttaattagcgagtatagtcttcgtagctatttttccaatctaccatgtaaagtgaggacaggttatgcaggcgttgatcttagaacagcaggacggtaaaaccctcgcatccgtgcaacatctcgaagagagtcaactgccggcaggtgatgtgacggtggatgtccactggtccagcctgaattataaagatgctctggctatcaccggaaaagggaaaattatccgtcattttccgatgattcctggtattgatttcgccggcaccgttcacgcaagcgaagatcctcgctttcatgcaggccaggaagtactactgactggctggggcgtgggcgaaaaccactggggcggcctggccgaacgcgcacgcgttaaaggcgactggctggtcgcgctgcctgcgggactgagcagccgtaacgccatgatcatcggcaccgccggttttaccgccatgctgtgcgtcatggcgcttgaagatgcaggtattcgcccgcaagacggtgaggttgtcgtcaccggtgccagcggcggcgtgggcagcactgccgttgcattactgcataagctgggctatcaggttgcagcagtatcaggacgtgaaagcacccacggctatcttaagagcctgggagctaaccgtattctcagccgcgatgagtttgctgaatctcgcccgttggaaaaacagctatgggccggtgcaattgataccgttggcgataaagtgctggcgaaagtgctggcacagatgaactatggcggttgcgtggccgcctgcggcctggcgggcggcttcgcgctgccgaccaccgttatgccattcattctgcgtaatgtgcgtttgcaaggggtagactcggtgatgaccccaccggcacgtcgcgcagaagcctgggcgcgtttggttaaggatctgccggaatcgttctatgctcaggccgccacagagattacgctggcggatgcgccgaagttcgccgatgccatcatcaataatcaggttcagggccgtacgctggtgaagataaaataacgtcacgtataaaaaaatttacacttaattaactatttatttttacacattgacacactccctgtcatattcactacacgccatgttgtggtgggtagaccgggagtctgtgatgaaaaagatacgtccattaacagaagccgatgtgactgcggaatcggctttttttatgcagcgccgacaggtgctaaaagcattaggcatcagcgcggccgccttatccttaccctcaacggcgcaggccgatctcttcagttggtttaaaggcaacgatcgtccgaaagcgcctgccggtaaaccgcttgagtttagtcagcctgccgcctggcgaagcgatttagcgttaacgccggaagataaggtgacgggctacaacaatttctatgagtttggccttgataaagccgacccggcggccaatgccggaagtctgaaaaccgaaccgtggacgttgaaaatcagcggggaagtcgcgaagccatttacgctggattacgacgatttaacacatcgtttcccattagaagagcgtatctatcgaatgcgctgcgtcgaagcgtggtccatggtcgtgccgtggattggtttccctttatataagctactcgcgcaggcacagcccaccagccacgctaaatatgtggcattcgaaacgctatacgcgccggatgatatgccaggacagaaagatcgctttattggcggcggactgaaatacccttatgtcgaagggctacgtctggacgaagccatgcatccgctgactctgatgaccgttggcgtctatggtaaggcgttacccccgcaaaacggcgcgcctattcgactcatcgttccatggaagtatggttttaaaggtattaaatctattgtcagcattaaactcacccgcgaacgtccgccaaccacctggaatttgtcggctcccaacgaatatggtttttatgccaatgtgaacccgcatgtggatcatccacgctggtctcaggctaccgaacgctttattggttcaggcggtatccttgatgtgcaaaggcagccgacgctgctgtttaacggctacgccaatgaagtcgcttcgctgtatcgcggtctcaatttgcgggagaatttttaagtgcgtctgacagcaaaacagataacctggctaaaagtttgtctgcatcttgccggttttttgccgcttctgtggctcttttgggcgataaatcacggtggactcagcgcagacccggtaaaggatatccaacactttaccggcagaaccgcgctcaaatttttgctcgccaccttgctggtttcaccgctggcgcgctacgctaaacagccattattgatacgcacacgccgcctgttaggattatggtgtttcgtttgggctacgctgcatttaaccagctatgccttactggaactggggatacataacctggcgctgttaggaagcgagttgatttcacgcccttatttgacgcttgggatcattagctggctggtgttattggcgctgacgttgacctcaacgcaatttgcgcagcgtaaattgggcaaacgctggcaaacactgcataacgtcgtctatcttgtcgcgatcctggctcccatacattacctgtggtcggtaaagattttatcaccgcaaccggtcatctacgcggcattagcgttagcccttttagcgttgcgttaccggaagtttcgccagtggtggcgctagtttggtgaactgtgcggtcgattgcaaaacgcaaaacaggtaatgtcctttttatgtttcgggttgattatcttccctgataagaccagtatttagctgccaattgcgacgaaatagttataatgtgcgactttacattgcccaacggcgattttcgttcgcagaaagggtgacaatcgagcaatgaaggtatattttgttttttgcccgaaaatggcagaagatagccacacaatgactggcaaatcatgaatttcaccttcgggtgctacggcataacaggcaaatcaaagatgcgcggtattttacccgcggcagtcattcacatgctttacagacggcgctaaaacgcctgtcacaatcacactaaacaaagagtacggaacccactcatggatattcgtaagattaaaaaactgatcgagctggttgaagaatcaggtatctccgaactggaaatttctgaaggcgaagaatctgttcgcatcagccgcacaacggcaaacgccggttttccggtgatgcagcaggcttatgcggcgccgatgatgcagcaacccgctctgtctaacgctgtcgcgccagcggctactccagcaatggaagcgcctgccgcagcggaaatcagtggtcacatcgtacgctccccaatggttggtactttctaccgcaccccaagcccggacgcgaaagcgttcatcgaagtgggccagaaagtgaacgtgggcgataccctgtgcatcgttgaagccatgaaaatgatgaaccagatcgaagctgacaaagcaggtactgtgaaagcgattctggtcgaaagtggtcaaccggtagaatttgacgagccactggtcgtcatcgagtaacgaggcgaacatgttggataaaattgtcatcgccaaccgcggcgagatcgcactacgtattcttcgagcctgtaaagaactcggcatcaagaccgtcgctgtgcactcaagcgcggatcgcgatttaaaacacgtattgctggcggatgagacggtctgtattggtccggcaccgtccgtaaaaagttatctgaacatcccggctatcattagcgccgctgaaatcaccggcgcggtggcaatccacccgggttacggcttcctttctgagaacgccaattttgccgagcaggttgaacgctccggctttatctttatcggcccgaaagcggacaccatccgcctgatgggcgataaagtgtccgcgattaccgcgatgaaaaaagcgggcgtgccgaccgtaccaggatctgacggcccgctgggcgacgatatgaatgcgaaccgcgctcatgccaaacgtattggctatccggtgatcatcaaagcgtccggcggcggcggcggccgcggtatgcgcgtagttcgtagcgatgctgaactggcgcagtccatctccatgaccaaagcggaagcgaaagcagctttcagcaacgacatggtatacatggaaaaatacctggaaaatccacgccacatcgaaattcaggtgctggcggacggccagggcaacgctatctatctggcggaacgcgactgttccatgcagcgtcgccaccagaaagtggttgaagaagccccggcgccaggcattacgccggaactgcgtcgctatatcggcgaacgctgcgcgaaagcgtgcgtagacatcggctatcgcggcgcagggacgttcgaattcctgttcgaaaacggcgagttctatttcatcgaaatgaacacccgtattcaggttgaacacccggtgactgaaatgattaccggcgtcgatttgatcaaagagcagttgcgcatcgcggcgggtcagccgctgtcgatcacacaggacgaagttgtcgttcgaggccatgcggtagaatgccgtatcaatgccgaagatccgaacaccttcctgccaagcccaggcaaaatcacgcgcttccatgcgcctggcggctttggcgttcgttgggaatcccatatctacgcgggctacacggtgccgccgtactatgattccatgatcggcaaactcatctgctacggtgaaaaccgcgacgtggcgattgcccgtatgaaaaatgccctgcaggaactgattatcgatggtatcaaaaccaatatcgatctgcagacccgcatcatgaatgacgagcacttccagcacggtggaaccaacatccactatctggagaaaaaactcggtcttcaggaaaagtaatcgcacgttaatctcaaaaggccggtgaatccggccttttttatttctggggatagcgatgccccatcatgtacaattcccgctttcttcacccataagggacaaaaaatggacgctcgttttgttcaggcccataaagaggcgcgctgggcgctgtggctgaccctttgctatctggcggcatggttagtggctgcttacttacctggagactcgccgggaatcaccggtctgccgcactggttcgagatggcctgcttattgacgccgctggtctttattttgctgtgctgggcgatggtgaaattcatttatcgcgatatttcgctggaggatgacgatgcagcttgaggtcattctaccgctggtagcctatctggtcgtggtcttcggggtctcgatttacgctatgcgcaagcgtaccgccggcacctttttaaacgaatattttcttggcagccgttcgatgggcgggatcgtgctcgcgatgacgcttaccgccacctatattagcgccagttcatttatcggcggtcccggcgcggcttataaatacggtctgggctgggtcttgctggcgatgatccagcttcccgccgtctggctttcactgggtattctgggtaaaaaattcgctatcctggcgcgtcgctataatgccgtcacgcttaacgatatgctattcgctcgttaccaaagccgcctgctggtgtggttggcaagcctgagtttattggtcgcgtttattggcgcaatgaccgtacaatttatcggcggcgcgcgactgctggaaaccgcggcgggaattccctacgaaaccggcctgctaatatttggcgtcagtatcgcactctatacggcgtttggcggctttcgcgccagcgtacttaacgatacgctacagggcctggtgatgctggtcggcacgatagtgctgctggtgggcgtgatccatgcggcgggcggtctaagtcaggccgttgacacgctgcacgctctcgaccccaaactggtaacgccgcagggcgccgatgacatactttctcccgcctttatgacctctttttgggtactggtctgttttggtgtgattggcctgccgcatacggcggtgcgctgcatctcctataaagacagtaaagcggtacaccggggcattattatcggtacgattgtcgtggcgattttaatgttcgggatgcaccttgccggcgcgctgggtcgcgcggtgcttccggatctgacggtgccggatctggtgatcccaacgctaatggtgaaagttttgccgccgtttgccgccgggatcttcctcgctgcgccaatggcggcgatcatgtcaacaattaacgcccaactgctgcaaagttccgcgacgatcattaaagatctctatctcaacctgcgccccgatcagatgcaaaatgagatccggctgaagcgtatgtcggcagcgattacattactgctaggcgcgctgttgctgctggccgcatggaaaccgccagagatgatcatttggctcaacctgctggcgtttggcggcctggaagcggtgttcttatggccgctggtattgggcctttactgggagcgggcaaacgcggcaggcgcattaagcgccatgatcgtgggcggcgtgctatatgccctgcttgccacatttaatattcagtacctgggctttcatccgattgtgcccgcgttactgttaagtttattggcttttctgatcggaaaccgattcggctcttccgcttcgcaagccaccgtattgtctactgataaataaagagttttgccatgccatggatccaattgaaactgaataccaccggcgcgaatgctgaagagctgagtgatgcgctgatggaagcgggcgccgtttccattacctttcaggatacgcacgatacgccggtttttgagccgttgccgggcgaaacccgtctgtggggcgataccgatgtgatcggtctgttcgacgccgaaaccgacatgaaagacgttgtcgcgattctggagcaacatccgctgctgggtgccggatttgcccataaaatcgaacaactggaagataaagactgggaacgcgaatggatggataatttccatccgatgcgttttggcgagcgtctgtggatttgtcccagctggcgtgacattccggacgagaatgccgtcaacgtgatgctcgacccgggactggcgttcggtacgggtacgcaccccaccacctctttatgtctgcaatggctggacgggctcgatctcaacggcaaaaccgtgatcgactttggctgcggttcaggcattctagcgattgccgcgctgaaactgggagcggcaaaggcgattggtattgatatcgatccgcaagctattcaggccagtcgcgataatgctgaacgcaacggcgtgtctgaccggctggagctgtacctgccgaaagaccagccagaagccatgaaagccgacgtggtcgtcgctaacatcctggcaggcccattacgcgaactggccccgttaatcagcgtactgcccgttgagggcggtctgctggggctttcaggtattctcgccagccaggcggaaagcgtctgcgatgcttacgccgagcttttcactctcgacccggtcgtcgaaaaagaagaatggtgccgcattactggccgtaagaaataattcttgtcagcgtggtcgcccggccacgcttttctccacacaactgccttaacgcctttcaggcaccgagacatcattaaattcatcaaatgaatgcctgaaataacttctttgtcactatccgtctggataaacagctgctaccagcggacaaaagatactggcgttttaacgggtcgcagccatcgccctcgtacttagtaatgctgtccgggttgttctgcagcatccgctaaccctctcttcagcgcagctggaaaaatttatccgtgccattcatgaacacaaaagcgcatctgtgcgcccccttccgactggcaatggagaaaaatcacgcgcagcgggaagtgatcttgtcctgaaacgagacggcgatcccattcatttggggtaattagcttataaaaaaagcagattattccgcttatcttgtttctggacgaagaaatagagagaagttacgggaatttgtaagcgcgtacaaaaccgccgacaataaataaccctatgattttaatgaattataaatttattttgctgtttttaagcacgattcattgatctacaacagtggattgttcaaagtttggcctttcatctcgtgcaaaaaatgcgtaatatacgccgccttgcagtcacagtatggtcatttcttaactcatgcgcatcggacaatatcagctcagaaatcgcctgatcgcagcgcccatggctggcattactgacagacctttccggacgctgtgctatgagatgggagcaggattgacagtatccgagatgatgtcttctaacccgcaagtgtgggaaagcgataaatctcgtttacggatggtgcacgttgatgagccaggaattcgcacggtgcaaattgccggtagcgaccctgttgagatggccgatgccgcacgtattaacgtggaaagcggcgcccagattattgatatcaatatggggtgcccggcgaagaaagtgaatcgtaagctggcaggttcagccctcttgcagtacccggatttagtgaagtctatactcatcggggtcgtaaacgcagtggacgttcctgtgactctcaagattcgcaccggctgggcgccggaacaccgtaactgcgtagagattgcccaactggctgaagattgtggtattcaggctctgaccatccatggccgcacccgcgcctgtttgttcaacggagaagctgaatacgacagtattcgggcagttaagcagaaagtttccattccgattatcgcgaatggcgacattactaacccgcataaagccagagctgttctcgactatacaggggcggatgccctgatgataggccgcgcagctcagggaagaccctggatctttcgggaaatccagcattatctggacactggggagctgcttccgccgctgccgctggcagaggtaaagcgcttgctttgcacgcatgttcgggaactgcatgacttttacggtcaggcaaaagggtaccgaatcgcgcgtaaacacgtctcctggtatctccaggagcacgctccagacgaccagtttcggcgcacattcaacgctattgaggacgccagcgaacagctggaggcgttggaggcatacttcgaaaattttgcgtaaacagaaataaagagctgacagaactatgttcgaacaacgcgtaaattctgacgtactgaccgtttctaccgttaactctcaggatcaggtaacccaaaaacccctgcgtgactcggttaaacaggcactgaagaactattttgctcaactgaatggtcaggacgttaatgacctgtatgagctggtactggctgaagtagaacagcccctgttggacatggtgatgcaatacacccgtggtaaccagacccgtgctgctctgatgatgggcatcaaccgtggtacgctgcgtaaaaaattaaaaaaatacggcatgaactaatttcgattagctaactgcttgtttaaaaaggcgctactcggcatggggaagcgccttttttatacgcatcacatggaatttggtcatgaaagcggaatgtgaacctcagtactttggcgatgaatcgaagaagattattcacggtgacgcgctaacagaacttaaaaaactgccttctgaaagcattgacttaatttttgccgatccgccttacaatatcggaaaagatttcgacggtatggtggagtcctgggacgaagcgtcttttctggcctggctgtatgaatgcattgatgagtgccaccgcgtactgaagaaacacggcaccatgtacatcatgaatagcacagaaaatatgccgtatatcgatctcaaatgccgaacgctttttaccatcaaaagccgtatcgtctggtcctatgatagttccggggtgcaggcgaaaaaatactttggttctatgtatgaaccgatcctgatgatggtaaaaaacccgaaaagctatacctttaaccgtgatgcgattctggtcgaaaccactacgggcgctaagcgcgcgctaatcgattatcgaaaaaacccgccccaaccatacaatcagaaaaaagtgccgggcaacgtctggtcatttcctcgcgtacgttatctgatggatgaatatgaaaaccatcctacgcaaaagcccagcgcgctgttaaaacggatcatactggcctcttctaacccgagcgataccgtattggaccctttcgcgggcagtttcaccacaggcgctgtcgcagcggcgtcaggtcgtaagtttatcggtattgaactcaataatgagtacgtaaaaatggggctcagaagattgagcgtcacttcgcattattcagaaaatgaacttgcaaaagtcaaaaagagaaaaacacaaaacctgtccaaaaagcagcgaaatgtcgggataaacgcgctatcttcagagaagtaaaagcattgtaagtccgcttttcagcgtcaaaatttcatgtatattcccagcacgcatgggcatgaatacacaggatttgacgatgatacgtaagtattggtggctggttgtttttgccgtctccgtttttctttttgatgcgcttttgatgcaatggatcgaattgatggcaactgaacaggataagtgccgaaacatggattcggttaaccctctcaaattgatcaattgtaccgatctggagtagcgaaccgggcgatttaacctatgattatttatcacccggatttcttttatcccttataaaaacagggaattaaaacacgttgaggataaaagaaggggtgatactgtctcgtcctgttcttttcctgcataaccaatgagctaatgatacatgccggttagtgagtacaaccacatccttgtggcggtttcatttgctgtcgctatttttgcgtcctataccgcattaaatatggccggacgcgtagccggaagcgcccgatcaaacgccagaatatggctaatgggcggcggcttcgcgctgggcgtcggtatttgggcgatgcattttgtcgggatgctggcgatggatcacgcgatgaacatgcgcttcgatccgttcctcaccggcctctccatgctgatcgcgatcggctcctccctgtttgcgctatggctggtcagcgctgaaaaactgcgcctgcgccgtttactgccgggcgcgctggtgatgggactgggcatcagcgcaatgcattataccgggatggcggcgctgcaatttgcttccattatcgtctggaatagcgcgtgggttgccctctctatcattatcgcgctactggcgtcctgcggcgcgctgtggctcacgttccgcctgcgtcatgagggaacagatgtcgccctgaggcgagcaggcgccgcggtattaatggggatagctatcgccggcatgcattacgccggcatgaaggccgcacactttccccaaaactggccgatggagcatcgtggcgtcgatagcaactggctggctgttcttgtcagcgtggtcgcgctgactatcctgggtattactctgctggtttctttatttgacgcccggcttcaggcccgtaccgcactacttgcctcttcgctggcgcaggcgaaccaggaactggcgcagttggcgctgcatgatacgctcacccgtttaccaaaccgggtgcttcttgaggatcgtctggaacaggccatcagcaaagcgaatcgggaaaacacgtctttcgcgctactgtttatggatctggatggctttaaaaccgttaatgacgcttatggtcatgatatcggcgataagctactggtagcggtcacgcatcgtctgaaccaaccgctgagcgggcagtttaccctggcgcggattggcggcgacgaatttgtgctgcttgcagaagtcagcgcgcctgacgaagcggcttcccttgccagcgcgctggtacattcgatagatgcgccctttacaatagatccgtacgaactggtcgtcacccttagcgtgggaatagcgctctatccgctggacggaaaaaacgaacgggaactgatgttcaacgccgatgccgcaatgtaccacacgaaacatacggggcgtaacggataccatttctttcagccatcaatgaatatgctggcgcaaacccaacttcagctaatgaatgacctgtggctggcgctggaaagacaagagctcaggctagtgtatcagcctaaatttcaggctcctgccggccctattgtaggatttgaggccctgttgcgctggtatcatccaaaacaaggcgtactgaatcctgaccagtttttaccgctggcggaaaaaacgggtcttatcgtcactatcggtagctgggtgatagacgaggcgtgtcgacagctccgcgagtggcacttacagggatacgacttatggtcagtggcggtaaatctgtccgccttacaatttgagcagcccgggcttgtggacaccattacgcggagcctggcccgacacagtatccgtcccgatttattgattctggaaatcaccgaaaccacggcgatgaacaagccagagcaaagcgtcgctatactcaccagattaacggaaatgggggttaaggcctctattgacgactttggcaccggttattccagccttctctatctgaaacgtcttccggcgtgcgaactaaaaattgatcgcgctttcgtacatgaactcagcgaggcaggcgacggcgcgaccattgttgcggctattgtcgcgctggcgaaagcgttaaatctgcaaattgtggcagaaggggtagagaatgaaacgcagcaacaatttttgacccagttaggatgccatacgcttcaggggttcctgcttggcaagccgcgtacggcagaggaaattgctcgcgatattcgggatcctgccaatatattcacaaggtcaatatataatatcaactcaaaataatctcaggcttcttccgcctgttgttcatttggcattaattgcctcacactgccatccgggcttagcatttttaatacattatcgactaatgcaggcgcctgcttataaagatcataacttgtgggattcattaaccagttttttactattccgctaaaactaccatgcagaataattaatatgacatccagatcaagactgcctgagatcagttttttatccatacatcgctgtaatacttcaagcagcgactgatgatggaaacccatcttctcccgaatggcctgttccgatatcataccattatggaattcacatttatgatataaaatctgcattaatgcctgctgacgaggcactgccgcaatatattgtaaggctgcaataaatttctctcgtagatcctgtaaaggattatcattccagcatcccgtaagcctatcctgaataagttcgcgtaaaggtggttgctgtaaccaaacctcattaaacaactgcgttttattctcaaagtgccagtagatggcgccccgcgtgacatcagcggcatcagcgatatcattcaacgtcgtgttggcaacgccgcgcaaagcgaactgcgcaatagcggtttcaatcaaatgttgccgcgttttaagcgcatccgccttcgttttcttcgccataattaagatatcctggaccataaaaacgataaatacgctgataaaatactcagcacaaaaaacaactttatcatgtcctttttagtcagacgagagacagctatttttatttcgcacaatatcgccaaatcaataataaaaacaaataaattaataaaacacattcatataaaatatatatttctatttatgttattcaacatcatgattttactaatcgggacattatgaaacgacagggaatagttctttttttttgcttttatgtgccgtgaaccccatcccaaaataagtattgcttacatcacaagctaataatttgtaggataccccactgctattctatttttcgcgcgttaacgccttaccgttatccggtgaataacgagctttcggttttttaaggaacagtaatgacgaaacatgccaggttttcactcctgccctcattcatcatattctctgctgcgctgctggccggttgtaatgaccagggagatacccaggctcatgccggcgagccgcaagtcaccgtccatgtggtcgaaacagcgccgctagccgtaacgaccgaacttcccggacgtacgtccgcatttcgcattgcggaggttcgcccccaggtgagcgggatcgtgcttaaaagaaacttcaccgaaggtagcgatgtagaggccgggcagtcgctctatcagatcgatcctgccacttatcaggctgattatgacagcgctaaaggcgaacttgctaaaagcgaagcggctgcggctatcgcgcacctgacggtcaaacgctatgttccactggtcggcacaaaatatatcagccaacaggaatatgatcaggcgattgccgacgcccgccaggccgatgccgccgttgtggcggcaaaagccgctgttgaaagcgcgcgtattaaccttgcgtataccaaagtcacctcacccatcagcgggcgtataggaaaatctaatgtgactgaaggcgcgctggtgactaatggtcagtcaactgaactggctaccgtgcaacaactcgatccgatttatgtcgacgtgacgcaatcaagcaacgactttatgcgactcaagcaatccgtcgaacaaggtaacctgcataaagacagcgccagtagcacggttcaactggtaatggaaaatggtcaggtctacccgattaaaggcacgctgcaattttccgacgttaccgtagatgaaagcaccggctctatcacgctcagggcggtgttccctaacccgcaacacagtctgcttcccggtatgtttgttcgcgcccgcattgatgaaggcgtccagcccaatgccatccttgtcccccagcagggcgtaacccgcacgccgcgcggcgacgcaatggtgatggtggttaacgataaaagccaggtcgaagcccgcaatgtcgtggcggcgcaggctattggcgataaatggctcatcagcgaagggttaaaaccgggcgataaggtcatcgtcagcggcttacaaaaagcgcgaccgggcgtccaggtgaaagccactaccgatgctcctgcagcgaaaacggcgcaataaggtaaccgtacatggcaaacttttttattagacgtcctattttcgcctgggttctggccattatcctgatgatggctggcgcactggcaataatgcaacttcccgttgcgcagtatccaaccattgcgccgccagcggtttctatttctgcaacctatcctggcgcggatgcgcagacggtacaggatacggttactcaggttatcgaacaaaatatgaacggtatcgataacctgatgtatatgtcctctaccagcgactctgctggtagcgtgaccatcaccctgaccttccagtccggaaccgatccggatatcgcgcaggttcaggtgcaaaataaattgcagctcgccacgcctttactgccgcaagaagtccagcagcaggggattagcgttgaaaaatccagcagcagctttttgatggtcgccgggttcgtctcagataatccgaacactacccaggacgacatctctgactatgtcgcctctaacattaaggattctatcagccgtctgaatggtgtgggcgacgttcagctatttggcgcacagtacgccatgcgtatctggctggatgcgaatctgctaaataaataccagctcacgccagttgacgtcatcaaccagttaaaagtacagaacgaccagattgcggcaggccaactgggcggcacgccagcattaccgggccagcagcttaacgcctcaatcatcgcccaaacgcgtctgaaagatccggaagagttcggcaaagttacgttgcgcgtcaataccgacggctctgtcgtccatctcaaagatgtcgcgcgtattgagcttggcggtgaaaactataacgttgtagcgcgcattaacggtaaaccggcctccggtctcggtattaaactggcgaccggcgctaacgcgctggataccgcaaccgcaatcaaagtgaaactggcggagctgcagcctttcttccctcagggaatgaaggtggtttatccttatgacacaacgcccttcgtaaaaatatctatccacgaagtggtaaaaacgctgtttgaagcgattattctggtgttcctggtaatgtatctgttcttacagaatatccgggcaaccctgattcctaccatcgctgttcctgtcgtgttgctaggcacttttgcggtactcgccgcctttggctattccatcaataccctgacgatgtttggtatggtactggcgatagggctgttggttgacgatgcgatagtggtcgtagaaaacgttgaacgtgtaatgatggaggataacctttctccccgagaggcgacggaaaaatccatgtcgcagattcagggagcgctggttggtatcgcgatggtactgtctgcggtatttatcccgatggccttttttggcggctcgaccggggcaatttatcgccagttctctattactattgtttcagcaatggcgctatccgttctggttgcgttgattctgacgccagcactgtgcgctacgctgcttaaacccgtatctgctgaacatcacgagaaaaaaagcggcttctttggctggttcaataccaggtttgaccacagcgttaaccactatactaacagcgtaagcggcatcgtgcgtaatacgggtcgctatctcattatctatctacttattgtagtcggaatggcggttctgtttttacgcctcccgacctccttcctgccggaagaagatcagggagtattcctgaccatgattcagctcccctctggcgctacgcaagaacgtacgcagaaagtgctggatcaagtcactcattactacctgaataatgaaaaagcgaacgtcgaaagcgtgtttaccgtaaacggctttagctttagcggtcagggacaaaactcagggatggcatttgtcagccttaaaccctgggaagagcgtaacggtgaagaaaatagcgtcgaagccgttatcgccagagcgacacgcgcctttagccagattcgcgacgggttggtgttccccttcaacatgccggcaattgtcgagttaggtaccgcaacaggtttcgacttcgaactgattgatcagggaggactcggtcacgatgcgttaacaaaagcgcgtaatcaactcctgggtatggtcgcgaagcatcctgatctattagtgcgcgtacgcccgaacgggctggaagacacgccacagttcaagctggatgtcgatcaagaaaaagcgcaggcgctcggcgtttcgctgtctgatatcaacgaaaccatctccgcggcgttgggcggctattacgttaacgactttatcgatcgcggacgagtgaaaaaagtatacgttcaggctgacgctcagttccgtatgctgccgggagatatcaacaatctttatgttcgcagcgctaatggcgagatggtgcccttctctacctttagctcagcacggtggatttatggttcgccacgcctggaacgctataacgggatgccgtcaatggaactgctcggcgaagcagcacccggacgaagcaccggtgaagccatgtcgttaatggaaaacctggcttcacagctaccaaacggtattggctatgactggacaggtatgtcgtatcaggaacggttgtcaggtaaccaggcgccggcgctgtacgcaatctcactcattgtcgttttcctctgccttgccgctctgtatgaaagctggtcaattccgttctcggtaatgctggtcgtaccgctcggcgtggttggcgctctgcttgcagcgtcattgcgcggtctgaacaatgacgtttacttccaggttggcttgttaaccactattggcctttctgctaaaaacgccatcctgattgtcgagttcgccaaagatctcatggaaaaagaaggacgtggattgattgaagcgacgctggaagcatcccgtatgcgtttacgtcctattctaatgacctcgctggcctttattctcggggtaatgccgttagttatcagtcgtggcgcaggtagtggtgcacagaacgcagtaggcacaggggttatggggggaatgttaaccgcaaccttattagctatcttcttcgtgccggtattcttcgttgttgtaaaacgccgatttaatcgccatcatgattaaccggtaaacagaggcgtcttcggacgcctttttaaacggtacgtctttatctccgctattccccctctccgcttacctctgcattctccatagtttttacaattcacatgaattgagatgattcctcatgtcggccattttttctgtggtggtaaaataactctcgttttcgcagcggttagagccagcattacgttgctgtacttcgcgaaacgctgattaatgaggtaacaccatgaaaagactaattccagttgcattgcttaccaccttattggcaggttgtgcacatgattctccctgcgtaccggtttatgacgatcaagggcggctggttcataccaatacatgtatgaaaggtacaacgcaggataactgggagacagcaggcgctattgctggcggcgctgcggcggtagcagggttgacgatgggtatcattgcgctttctaaatgatacatgcaggcgcggcaatgccgcgctttcagtaataatataaaggtcgtaaggatactcagcgacgtaatctgttcagcctgtcccccgaaagttaacacgataaaacgctctcttttcttactcgcccatcccgatggtatttattctattccttgtccgatgcagacaaaattatagcttgatagcatcgtaagccgcattacaaacaggctttatacagtaagacttagagcgtgatcattaggcgtaattattacagacagtctggatataaaccggaacatacacgtaatacatgaggattttgagcactgtccctaggccaaactggcaaataaaatagcctaatgggccagatttttagtcctcagcgaatatctctattgcttattagaggcgtaagtaaaagccgtttgtacatctacttcagcacggttcacattcgatggttcaggcggatatatggtgggaaatcacgttgactaaaacggtttttatccactctacgaagatgtttaaaacgcgtcggcgtcattatccgataactttttccatagagagataaatgcaaaaaggcccagtctttcgattgggccctttgctttatttgatgtctggcagtttatggcgggcgtcctgcccgccaccctacgggccgttgctgcgcaacgttcaaatccgctcccggcggatttgtcctcctcaggagactactcaccgacaaacaacagataaaacaaaaggcccagtctttcgactgagccttttgttttatttgatgtctggcagttccctactctcgcatggggagaccccacactaccatcggcgctacggcgtttcacttctgagttcggcatggggtcaggtgggaccaccgcgctactgccgccagacaaattctttttcaaataccgaactttaaccgtattaagtggtgctgatacccagagtcgaactggggacctcacccttaccaagggtgcgctctaccaactgagccatatcagcacactaaatttgatgcctggcagttccctactctcgcatggggagaccccacactaccatcggcgctacggcgtttcacttctgagttcggcatggggtcaggtgggaccaccgcgctagtgccgccaggcaaattctgttatcagaccgtttttacgttctgatgtaatctgaatcagtgctgaaaatcttctcttaaccgccaaaacatcttcggcgttgtaaggttaagcctcacggttcattagtaccggttagctcaacgcatcgctgcgcttacacacccggcctatcaacgtcgtcgtcttcaacgttccttcaggagactctaagtctcagggagaactcatctcggggcaagtttcgtgcttagatgctttcagcacttatctcttccgcatttagctaccgggcagtgccattggcatgacaacccgaacaccagtgatgcgtccactccggtcctctcgtactaggagcagcccccctcagttctccagcgcccacggcagatagggaccgaactgtctcacgacgttctaaacccagctcgcgtaccactttaaatggcgaacagccatacccttgggacctacttcagccccaggatgtgatgagccgacatcgaggtgccaaacaccgccgtcgatatgaactcttgggcggtatcagcctgttatccccggagtaccttttatccgttgagcgatggcccttccattcagaaccaccggatcactatgacctgctttcgcacctgctcgcgccgtcacgctcgcagtcaagctggcttatgccattgcactaacctcctgatgtccgaccaggattagccaaccttcgtgctcctccgttactctttaggaggagaccgccccagtcaaactacccaccagacactgtccgcaacccggattacgggtccacgttagaacatcaaacattaaagggtggtatttcaaggtcggctccatgcagactggcgtccacacttcaaagcctcccacctatcctacacatcaaggctcaatgttcagtgtcaagctatagtaaaggttcacggggtctttccgtcttgccgcgggtacactgcatcttcacagcgagttcaatttcactgagtctcgggtggagacagcctggccatcattacgccattcgtgcaggtcggaacttacccgacaaggaatttcgctaccttaggaccgttatagttacggccgccgtttaccggggcttcgatcaggagcttcgcttgcgctgaccccatcaattaaccttccggcaccgggcaggcgtcacaccgtatacgtccactttcgtgtttgcacagtgctgtgtttttaataaacagttgcagccagctggtatcttcgactgacttcagctccatgagtaaatcacttcacctacgtgtcagcgtgccttctcccgaagttacggcaccattttgcctagttccttcacccgagttctctcaagcgccttggtattctctacctgaccacctgtgtcggtttggggtacgatttgatgttacctgatgcttagaggcttttcctggaagcagggcatttgttgcttcagcaccgtagtgcctcgtcgtcacgcctcagtgttaaagtgaaccggatttacctggaacacacacctacacgcttaaaccgggacaaccgtcgcccggccaacatagccttctccgtccccccttcgcagtaacaccaagtacgggaatattaacccgtttcccatcgactacgcctttcggcctcgccttaggggtcgactcaccctgccccgattaacgttggacaggaacccttggtcttccggcgagcgggcttttcacccgctttatcgttacttatgtcagcattcgcacttctgatacctccagcatgcctcacgacacaccttcacaggcttacagaacgctcccctacccaacgaacgtatccctaagccaactcgactttaatgaacgctttgacgtcgcttcgctccgtcaatcgtcaactccgtaaagttgtcttgggtgatacgttcgctgccgcagcttcggtgcatggtttagccccgttacatcttccgcgcaggccgactcgaccagtgagctattacgctttctttaaatgatggctgcttctaagccaacatcctggctgtctgggccttcccacatcgtttcccacttaaccatgactttgggaccttagctggcggtctgggttgtttccctcttcacgacggacgttagcacccgccgtgtgtctcccgtgataacattctccggtattcgcagtttgcatcgggttggtaagccgggatggccccctagccgaaacagtgctctacccccggagatgaattcacgaggcgctacctaaatagctttcggggagaaccagctatctcccggtttgattggcctttcacccccagccacaggtcatccgctaatttttcaacattagtcggttcggtcctccagttagtgttacccaaccttcaacctgcccatggctagatcaccgggtttcgggtctataccctgcaacttaacgcccggttaagactcggtttccctacggctcccctatacggttaaccttgctacagaatataagtcgctgacccattatacaaaaggtacgcagtcacacaggtaaacctgtgctcccactgcttgtacgtacacggtttcaggttctttttcactcccctcgccggggttcttttcgcctttccctcacggtactggttcactatcggtcagtcaggagtatttagccttggaggatggtccccccatattcagacaggataccacgtgtcccgccctactcatcgagctcacagcacatgcgcttttgtgtacggggctgtcaccctgtatcgcgcacctttccagacgcttccactaacacacatgctgattcaggctctgggctcctccccgttcgctcgccgctactgggggaatctcggttgatttcttttcctcggggtacttagatgtttcagttcccccggttcgcctcattaacctatggattcagttaatgatagtgtgacgaatcacactgggtttccccattcgggtatcgccggttataacggttcatatcaccttaccggcgcttatcgcagattagcacgcccttcatcgcctctgactgccagggcatccaccgtgtacgcttagtcgcttaacctcacaacccgaagatgtttcttacgattcatcatcgtgttgcgaaaatttgagagactcacgaacaactttcgttgttctgtgtttcaattttcagcttgatccagatttttaaagagcaaatatctcaaacgtgactcgtaagtcagttttgagatattaaggcaggtgactttcactcacaaaccagcaagtggcgtcccctggaggtttgacctcatcagtttgaacgctggcgtcccctaggggattcgaacccctgttaccgccgtgaaagggcggtgtcctgggcctctagacgaaggggacactgaagtctcaatcgcaagacgccttgctattcacttttcatcagacaatctgtgtgagcacttcaaagtacgcttctttaaggtaaggaggtgatccaaccgcaggttcccctacggttaccttgttacgacttcaccccagtcatgaatcacaaagtggtaagcgccctcccgaaggttaagctacctacttcttttgcaacccactcccatggtgtgacgggcggtgtgtacaaggcccgggaacgtattcaccgtggcattctgatccacgattactagcgattccgacttcatggagtcgagttgcagactccaatccggactacgacgcactttatgaggtccgcttgctctcgcgaggtcgcttctctttgtatgcgccattgtagcacgtgtgtagccctggtcgtaagggccatgatgacttgacgtcatccccaccttcctccagtttatcactggcagtctcctttgagttcccgacctaatcgctggcaacaaaggataagggttgcgctcgttgcgggacttaacccaacatttcacaacacgagctgacgacagccatgcagcacctgtctcacagttcccgaaggcaccaatccatctctggaaagttctgtggatgtcaagaccaggtaaggttcttcgcgttgcatcgaattaaaccacatgctccaccgcttgtgcgggcccccgtcaattcatttgagttttaaccttgcggccgtactccccaggcggtctacttaacgcgttagctccggaagccacgcctcaagggcacaacctccaagtagacatcgtttacggcgtggactaccagggtatctaatcctgtttgctccccacgctttcgcacctgagcgtcagtctttgtccagggggccgccttcgccaccggtattcctccagatctctacgcatttcaccgctacacctggaattctacccccctctacaagactcaagcctgccagtttcgaatgcagttcccaggttgagcccggggatttcacatccgacttgacagaccgcctgcgtgcgctttacgcccagtaattccgattaacgcttgcaccctccgtattaccgcggctgctggcacggagttagccggtgcttcttctgcgggtaacgtcaattgctgcggttattaaccacaacaccttcctccccgctgaaagtactttacaacccgaaggccttcttcatacacgcggcatggctgcatcaggcttgcgcccattgtgcaatattccccactgctgcctcccgtaggagtctggaccgtgtctcagttccagtgtggctggtcatcctctcagaccagctagggatcgtcgccttggtgagccgttacctcaccaacaagctaatcccatctgggcacatctgatggcaagaggcccgaaggtccccctctttggtcttgcgacgttatgcggtattagccaccgtttccagtagttatccccctccatcaggcagtttcccagacattactcacccgtccgccactcgtcagcgaagcagcaagctgcttcctgttaccgttcgacttgcatgtgttaggcctgccgccagcgttcaatctgagccatgatcaaactcttcaatttaaaagtttgatgctcaatgaattaaacttcgtaatgaattacgtgttcactcttgagacttggtattcatttttcgtcctaggacgttaagaatccgtatcttcgagtgcccacacagattgtctgataaattgttaaagagcaggtgcgacgcggcttgcagctcaccgtcgcgaggtggcgtatattacgctttcctctttcagagtcaaccctgaatttcaggatttttctcttcaaccgaccggctgtttgtgtgaagtgattcacatccgccgtgtcgatggaggcgcattatagggatcccatttttttgcacaagcgttttttggatctttttttctgtttgttgatttttcatccctttcgctccattcctgcgcaaagtggcgattttttgatgctatctccccttgcacaacgccgttaaagcaaccaaagtcttcatgactattcatttatgatgaggtagacatgtctgacacattacgtccttataagaatctttttcctggtatcggtcagcgcgtgatgatcgataccagcagcgtggttattggcgatgtccgtctggcggatgatgtcgggatctggccgcttgtggtgattcgcggcgatgtgaattacgttgcgataggggctcgtacgaacattcaggatggcagcgttcttcacgtaacccacaagtcttcatccaatccacacggcaacccattaatcattggcgaagatgttaccgttggccataaagttatgctgcacggctgtaccatcggtaaccgcgtactggtcggtatgggctccattgtgctggatggcgcgataatagaagatgacgtaatgattggcgcgggaagcctggtgccgcagcacaaacggctggaaagcggctatttatatcttggcagtccggtaaaacagatccgccccttgagcgatgctgagagatcgggcctgcagtactccgccaataactatgtaaagtggaaagacgactatctttctcaggataaccatatccaaccgtgatcatcttcctgctgggccaggattaatgcttccgcctcttcttccaggtcccagcgatactcacgaaaaatggccagccattgctccgctgtttctccaccaaagcgatacgccagtacatctttttttattgcacacgtgagttgcatcccattaaccagggcgggaaagatgatagcactggcggcagtatcccattcttcgcggtcaggaaattgtatggcctggttcacgctaataattcctgctgtagctgctcaatcactggctcgacctgcggtaatacaccgtgccaaagcaaaacggcatgtgcagcctgccccaccagcattcccagcccatctgcgtagcgttttgcgccctgttgtacacaccaggagagaaatggcgtattccctttttgatagaacatgtcatagcaacagagggaagggtgaataagtgacgctggtatcgccgggatttcgccccgtatgccgctggaggtcgcattaataattaggtcaaactcacaaccatccagcttgtccatatccgtggcatgaacgctgccggtatgagcaaagattttcgccaacgcttcggcacgtgaagctgtacggttggtgatagtgaccgcgcaatccaaagaaagcagaggtaacagcacgccccgggatgcgccgcccgcgccaatcagcaaaatacgcaatcctgggcggataaaatttaaacgttcgagatcgcctaataaaccgataccgtcagtattgtcgccaagcaaacgaccatcttccagccgttttaatgtattgacggctcccgccagcgatgctcgttccgttaactcatccgaacgcgcaaacgcctcctctttaaaaggtactgtgatgtttgcgccttttccccctgccgcgaaaaaggcatcaagcgtattaatgaaattattaataggggccagcacgcgaccataggggtgaacaatatctagctgctgagcaaattgctgatgaataaatggcgatttgctgtgcgcaatcggatttccaaaaacagcataggtttccatcatattacccctgtcgaaacagttcgcccgtcagagcatcgcgaatttctgaaggatttaaacgcccacccgttgcgccttcaaccaccggaaaatcatcaccaaattgcgcacgcacctcttcaacggtacggcatggcggtaatccgctcagattggcgctggtggaaaccagcggtttgccatacgcattgcatagcgcgaccaccagcgggtggttggtaacacgaacggccagggaatcaaaacgtcccgtgagccaccgcggcgttgtcgcgggcgcaggaaaaacaaacgttaccggcccgggccagcaatcaaataccgctttacgctgtgcggcggtaagtatgctgtcatcaatataaggttttaactgctcaaagctggcggcaatcaaaatgagtcccttatcgacgggccgttgttttaacgccagcaggcgcgtaacggctgtttcactatcgggatcgcagccgacgccgaaaacggcttctgttggataagcgatgacattttctttattcaggagatctaccgctgcggcgatagatcctattggcaggttattattcacttgtttattccaccggaaccggctttccacattgtttactggcgcaaaagcgcttcacgccctgcgcggttttcttttcgatgagtagcggataatggcactcggggcattcccctgcaaccggtgtgaagttaatgacaaactgacattccgggtagcgatcgcaggaatgaaagattttaccgtaacgagaacggcgctggaccaaatgtccttgctggcaggctggacaggcaatcgccgtttcatccggtttatcaataaccactgtatgttcacattgcggatactgactgcatccgatgaacatgccaaagcgcccctgacgcaacaccagcacggcgccacactcagggcacagttgcccctccagaattttaacgatatgtccgtccgcctgacttttcagcggacgaacgtaatcgcattccggatagcgagaacagccgagaaacggaccatgtttcccggaacgaattaccagttcggccccgcactgcgggcagggctcatttttacgcaccgaaaacagtgctgatttagccatattcactcatgcagcattaacacctatcaatgcagcataccttcatttacctcaaagagtaattcttccatttgctgataggcgttttcacagcccggaatgttgaataacaccatcaaaataacccatttcaagtcttccaggtcaaactctgcggtatccagcgccagcacacgctcaatcaccatttctcgtgtttcgaggtttagcacctgaatctgctcaaggaataacaggaacccccggcaactggcatcaagcctttcacactcttcaaccgtataaatgcgcattgaaagagggtcggaagcaagttgcatgggttccgcgaggccatcctgatagtcagcgagtttttccagccacagcagcgcattgtagatgtcttcgcgatcaaacccagcgtcggtgagatcacgctccagtctgtcctgatccacgcgcagctcggcttcgttatggatgtatgtttcaaacaaatacattagtacgtcgaacatggcttgccctccttaatcggacatagccgccgggtacagctgcgatccatcctgctaactccagttcgagtagctgagccactaccgctggcacaggttggccggcacgttcagcgacgacgtcaacaggtgttacctcatctcctacgttagccaggagctcaggaaatggcaatgccgcctcatcctgatttagtgaataaagtgaattttccgccgtagttggcaaccagtgtaagccgtattgcaaattttccagaatatcctccggcgtcgtcacaagcgtggccccttgtttaattaaccagtgcgtgccttcgcttcccggactaccgataggacctggtaatgcaaaaacgtcccgcccctgttcaagcgcgcagcgcgccgtcaccaacgaaccgctgcgcaacgccgcctcgattaccagcacgcctttgctcagtccgctgatgatacggtttctgcgaggaaaatgttgcggtagcggaggcgttgaaagcggaaattctgagaccactgcgccgccggtggcaatcaagttttcagccagcatggcatgtcggcgaggataaatctttgccaagccattccctaacaccgctacactttttccccccatactcaccgcggcgttgtgtgctacgccatcaattccccgggcaaggccgctggtgatcgtcaaaccgcttttcgcaaggctttcgcaaagcagacgtccccagcgttctccataccaggagtggctccggctccctacgacggcaagttggcaggtatgcagacaggcaggatcgccgtcaataaaaatagcgccgggataatcgtcaatagcacgcagttggggaggataaatctcactatccgcacacagaaaatggtgctgcggtagttcaagccagcgtaatgtctcatcaagcacacctgctggaagctgtaaaaaacgttcagcttgccgcgcggtaagaccagcctcctgaaggtgcgtgcgatttatctgaggctggcgaataagcgagttcgccatgttcaacatcgcctcgccataaaggtcgccgacgtacattaaacgtaaccaaatttcggtacgggccatcctttccctcccctgccacaagcagtctgaacaatctttgcgattggtcactgatgctgtcaatcaggtggggatttgtctagaatagaggtaataatcttttcaactcctgaacacaactctggataattatgtcagttttgcaagtgttacatattccggacgagcgccttcgcaaagtcgcaaagccggttgaagaagtgaatgcagaaattcagcgtatcgtcgatgatatgttcgaaacgatgtacgcggaagaaggtatcggtctggccgcaacgcaggtcgatatccaccagcggatcatcgtgattgacgtttcggaaaaccgcgacgagcgcctggtactcattaacccggaattgctggagaaaagtggcgaaacgggtatagaagaaggctgtctgtcgattccggaacagcgcgctttagtgccgcgcgccgagaaagtgaaaatccgcgcgctggatcgcgacggcaacccgtttgagcttgaagcggatggtttgctggcaatttgcattcagcatgagatggatcatctggtcggtaaactgtttatcgattatttgtcgccgctgaagcaacaacgtattcgtcagaaagtagaaaaactcgaccgcctgaacgcccgggcttaaaggacaagaaccaacgtgtcagattcactacgtattatttttgcgggtacacctgactttgcagcgcgtcatctcgacgcgctgttaacttctggacataacgttgtcggcgtatttacccaacccgatcgtccagcaggtcgcggcaaaaagttgatgcccagcccggtaaaagtgctggcggaagaaaaaggcctgcccgttttccagcccgtgtcgcttcgtcctcaggaaaaccagcatctggtggctgacttacatgccgacgtcatggttgtcgtagcatatggtctgattctcccaaaggcagtgctggatatgccccgtctcggatgtatcaacgttcacggttcgctgcttccacgctggcgcggcgcggcgcctattcagcgctcactctgggcaggcgatgcggaaaccggcgtcacaattatgcagatggatgtagggctggataccggcgacatgctgtataaacttgcgtgcccgattaccgcagaagataccagtggctcactgtataataagttggctgaacttggcccgcaggggttaattaccacactaaaacaactggcggacggcacagcgacgcctgaagcgcagaatgaagcgctggtcactcatgcggaaaagctcagtaaagaagaagcgcgtatcgactggtctctctccgcagcacagctggagcgttgcattcgcgcctttaatccgtggccaatgagctggctggaaatcgacggccagccggtaaaagtctggcaggcgtccgtcattgaggacgccacgcagtcgctgccgggaaccattctggccgcgacgaaacagggcattcaggttgcaacaggcaaggggatattaaatttgctttcgcttcagcctgccggcaaaaaagcgatgagcgcccaggatctgttaaattcacgccgggaatggtttattcctggtaaccgtcttgcctgacggtcacgtctttataagcccggtgttaccgggcatttttattttatacatatgaaaaaacaaaacaatttacgtagtctggcagcacaggccgttgaacaggtcgtcgagcagggacaatcattaagtaatgtgctcccgccgctgcaacaaaaagtcgccgataaagacaaagcgctacttcaggagctgtgctttggcgtactgcgcaccctttcacagctggaatggctgatcaataagctgatgtctcgtccaatgaccggcaagcagcgtacagtgcattacttaattatggtcggcttttatcagttgctgtacacccgcgttcctccccatgcggcgctggctgaaaccgttgaaggcgcggtctccatcaaacgtccgcagttgaaagggttaattaacggcgtcctgcgccagttccagcgccagcaggaaacgttgcttaatgagtttgcgaccagcgatgcgcgctttttacatccaggttggctggtaaagcgtttgcaaaatgcttaccccacacagtggcaacacattattgaagcgaataaccagcgtccaccgatgtggctacgtgtaaatcgtacacaccacacccgcgacggttggcttggcttacttgaagacgcaggcatgaagggatatccccatcccgattatcccgacgctgtacgtctggaaacgccagctccggtacatgctttacccggttttgctgagggttgggtaactgtccaggatgcctctgcgcagggatgtgcggtttttctcgctcctcagaacggtgagcacattttagacttgtgcgccgcgcccggcggtaaaaccacgcatattctcgaagtggcccccgaagcagacgtgttggcagttgatattgatgaacaacgactctcccgcgtttacgacaacctaaagcgtcttgggatgaaagcgacagttaaacaaggggatggacgttatccctcccaatggtgcggcgagcagcagtttgaccgtattctgctggatgcgccctgctccgcaaccggcgtcattcgccgtcatccagatatcaaatggctgcgtcgcgatcgcgatatcgcggaactggcgcaattacaggcggaaattcttgatgccgtctggccgcgcctgaagcccggcgggacgctggtttacgccacctgttccgtactgccggaagaaaaccgcgatcagatcaaaacctttttacaacgcactcccgatgccgcgctcagcgaaacgggaacacctgatcagccaggacaacagaatctgccgggcggcgaagaaggtgatgggttcttttacgctaagctaatcaagaagtgatgagataacgggccacgactgatgaaaattatcatactgggcgcagggcaagttggcggaacactggcggaaaacctggtcggcgaaaacaacgacatcacggtggttgataccaacggcgaacggttacgcagtttgcaagataagttcgatctacgcgtagttcaggggcatggttcgcatccccgcgtgttgcgcgaagcgggcgctgacgatgcggatatgctggtcgctgtcaccagttcagatgaaactaatatggttgcctgccaggtagcctattcactcttcaacactccaaaccgtatcgcccgcattcgctccccggactatgttcgcgatgcggataaactctttcattctgaagcggttccgattgatcatctgatcgcgccggagcagttggttatcgataatatttatcgcctgatcgagtatccgggagcattacaggttgtaaactttgccgaagggaaagtcagtctggcagtagttaaagcctactatggcggtccactaataggtaacgcgctctcgacaatgcgagagcatatgccgcatatcgatacccgcgttgccgcaattttccgccatgacagaccaatccgtcctcagggctcgactatcgtggaagcaggggatgaagtcttctttattgcggcttcacagcatatccgtgcagtaatgagcgaattacagcgtctggaaaaaccctacaagcgcatcatgctggtgggcggcggcaatatcggcgccgggctggcaaggcgtctggaaaaagactatagcgttaaattgatcgaacgcgatcaacaacgcgccgcagaattggctgagaaactgcaaaacacgatcgtcttttttggcgacgcttccgatcaggaattgctggcggaggagcatattgatcaggtcgatctctttatcgcggtcactaacgatgatgaagccaatatcatgtccgcgatgttggctaagcggatgggcgccaagaaagtgatggtgttgatccaacgtcgcgcttatgtcgatcttgtgcagggtagcgttatagatattgcgatttctccgcagcaggccaccatctctgcattactgagccatgtgcgtaaagcggatatcgtcggcgtttcctcactacgtcgcggggttgccgaagccatcgaagccgtcgcgcacggcgatgaaagcacttcccgcgtggttggccgcgtcattgacgaaattaaactgccgccaggcaccattattggcgcggtggttcgcggtaatgatgtcatgatcgctaatgacaatttgcgcattgaacaaggcgatcacgtcattatgtttttgaccgataaaaagtttattaccgacgtcgaacgtctgttccagccaagtcctttcttcctctaatttaaggggcgctcattcagcgccctttttaattccctttatttatcaaggtttaatttatttcgctaaacagaagccgtaaatggaaaatgccttagcatttgttaaacttataacgtcagctgcatagggagaataaaaatgagttttattaaagaatttcgcgaattcgcgatgcgcgggaatgttgtggatttggcagtgggtgtcattattggcgcggcattcggtaagattgtttcttcactggttgccgatatcattatgccgccgttgggattgttaatcggcgggatcgactttaaacaatttgcttttacgttacgcgaagcgcagggagatattccggcggtcgtcatgcattacggcgtgtttatccagaacgtatttgattttgtgattgtggcctttgctatctttgttgccattaagcttatcaacagactcaaccgtaaaaaagcagaagagccggcagctccgccagcgccttctaaagaggaagtgttattgggcgaaatccgcgatctgctgaaagaacaaaataaccgttcttaataagcagaaggccagtggtaaaaaagtgattcactttcttgccactggcctcccagttccctcgattaccgtgtttacctttacgcagataacttcctttgcctttcttatttttttcaacgcgttgcctgaaaaggggatcgtgcagtaatgcctcgatggcattgtcctttatctgccctttcttatgttgataacgactcataatgtctcccgattgtataaattaacggcgcgagtgtagccccgccggttcaataaatcaacatcccgatttcgctccactggccccctgttccagggcttccagaatggaacaatagacgctactgtgggccgttccgcaacaagcatcattaagcctttgtaacgaacgctgcatcgtttgcagttccgcaatcctggcttcaacctcctgcaatcgctcttgcacaatactttttgactcctgacaggtatggtgctcaggatcaattcggatcgataaaagctcgcggatcgagtcgagcgtgaaacccaactgccgcgcataacgaataaacttgagacgctgcagatcgttttcggtatacagacgaaacccgccttcagtacgtacctcatgatccatcatctgttgcttttcatagtagcgaatggtatcaggcgttacgtctgccagctttgccagctcaccaatgcgatacatacaagctccgttaattatcgttgattttatgcagcagtttttctgcatactcaccgtgtaaaaagtcggtactcaacccagcctgccgaagttttagttcaagcagcgagagctggcgactaacctgatggtatcgagggtcatcttcccggatactgttgaggatatcaagtaactgaatagcatctctgcgctgctccagttcagggggaagacagcccgcattcttgagtaagcgataacccgcacgaagttccgccggcacatgagaatcatcatccagaataagcggctcgccacggccaggcaaattatcaaactcgcctttacgctgtgcctcgataatatgacgctctgcccactggtcaagtaaccacatacgtcgctccagggattgaacgaaaagaatacaattattgtagatatgtggggttcaggagggtataaaaaaacccgccgaagcgggtttttttacgttactacagattactctgcagcagcttctgttttctctgaacgatcaaccagctcgatgtatgccatcggcgcgttgtcgcctgcacggaagccacacttcagaatgcgagtgtaaccaccggcgcggctcgcgaaacgcgggcccagctcgttaaacagttttgccacgatctcgttatcacgagtacgggcgaatgccagacgacgattagcaacgctatcagtcttggcaagagtaatcagcggctcaactacgcgacgcagctctttcgctttaggcagggtcgtcttgatgatttcatgacgaaccagtgaacctgccatgttgcggaacatagcctggcgatggctgctgttgcggttcagttgacgaccactcttacgatggcgcatgaccttatccttctcagtaaaaccttaacctgtgatccggttactcgtcagcgatgcttgccggtggccagttttccaggcgcatacccagagacagtccacgggaagccagcacgtctttaatctcggtaagagattttttacccaagttaggcgtcttaagaagctcaacctcggtacgctgtaccagatcaccgatatagtggatagcttctgccttgaggcagttagcagagcggacagtcaattccagatcgtcaacagggcgcagcaggatcggatcgaattctggtttctcttctttcacttccggttgacgtacatcacgtaaatcaacgaaagcttccagttgttcagccaggatggttgccgcacgacgaatcgcctcttcaggatcgattgtgccgttggtttccatttcgatgaccagcttgtccaggtcggtacgctgttctacacgcgctgcttcaacattgtaggcaatacgctctacagggctgtagcaggcgtcgaccagcagacggccgattgggcgctcatcttcttccgaatgaattcgggtagaagccggcacataaccacgaccgcgctgaactttgatacgcatactaatagacgcgttttcatcggtcaggtggcagatcacgtgctgcggcttgacgatttcgacatccccatcatgggtgatatcggctgcagtcacagggccaatgccagatttattcaaggtaagaataacttcatctttaccctgaactctcaccgccagccctttcaggttgagcaggatttccaggatgtcttcctgaacgccttctttggtgctgtactcatgtagtacaccatcaatctcaacctcggtcaccgcgcaacccggcatcgatgagagcagaatacggcgcagtgcgttacccagagtatggccgaagccacgctctaaaggctcaagggtcaccttggcgtgcgtcgaactcacttgctcgatatctaccaggcgcggttttagaaactctgtcacagaaccctgcattgtgtcctctctttggtactaagctttacttggagtaaagctcgacgatcaggtgttcgttaatgtccgcagacagatcagaacgctcaggcttacgcttgtacgtaccttccatcttgccagcatcaacttccagccaggttggcttttcacgctgctcagccagctccagagcggctttcacgcgagactgcttcttcgctttctcacgaatgctaacaacgtcattcggactaacctgataagaagcgatgttaacaacacgaccgtttaccataattgctttatggctaaccagctgacgtgcttctgcacgagtggcgccgaagcccatacggtatacaacgttgtccagacgaccttccagcagagccaacaggttttcaccggtgttgcctttcagacgtgctgcttctttgtagtagttacggaactgacgctccagcacaccgtaaatgcggcgaactttttgcttttcacgcaactgcacaccatagtcagacagacgcggcttacgcgcaccgtgctggccaggagcttgttcaattttacacttggtatcgatcgcgcgaacgccagacttaaggaataagtcggtgccctcacgacggctcagcttgagcttaggacccaaatatcttgccattttctttctccaactaacctggaaaacgaagcgttatacgcgacgttttttcggcggacgacaaccgttatgagggatcggagtcacatcagtaatattagtgatgcggaaaccagcggcgttcagagcacgaatagtagattcgcggcctggacccggacctttaaccataacttccagattcttgataccgtattctttcacggcgtcagcgcaacgctctgctgcaacctgagctgcaaacggagtggatttgcgagaaccacggaaaccggaaccaccggctgttgcccaacccagcgcattaccctgacgatcggtaatagtcacgatggtgttgttgaaagaagcatggatatgagccacgccgtcagagacttgttttcttacacgtttacgtgcgcgaactggtgcctttgccattattcaatcaccccgattatttcttgatcggtttgcgcggacccttacgggtacgagcgttggtcttggtacgctgaccgcgaaccgggagaccacgacgatgacgcaaaccgcgatagcaaccaagatccatcaggcgcttgatgctcatgctgatttcacggcgcagatcaccttcaacgacaaatttggcaacttcgtcacgcagcgtgtcgatttgttcttcagacagctcactgatcttaacattttcagcgatacccgctgcagccaggatggctttagaacgggtcttgccgacaccgtagatcgaagttaacgcgatcacggcgtgtttctgatcaggaatgttaatgcctgctatacgggccactatgcactcctactatttaatatgtacgtaccatgctgaaaagcccgttttcaggatactcaaatggaaacgtacagacatacaaaagattggctggctaatctagccagctcaacccaactttgcaagaaaaatatgcgaaaaaatcagccttggcgctgtttatgcttcggctcggcactgcaaatcacacggatgacaccatcacgcttaacgattttgcagttacggcataatttcttgacggaagcacgaactttcatttttactctccgtaacttctcaggcgaccaattaacggccgtagcctttcaggttcgccttcttcaatgcagactcatactgactggacatcatcagagtttgcacttgagccataaagtccataatcacgacaacaacgataagcagtgaggtcccaccgaagtagaacggcactttcattgcatcacgcatgaactccgggatcaggcagataaaggtaatatacagcgcaccaaccagggtcaggcgggtcattactttatcgatatacttcgccgtttgctctcccggacgaattcctggtacaaatgcaccggacttcttcaggttatctgctgtttcacgcgggttgaaaaccaacgccgtgtagaagaaacagaagaagatgattgcagacgcatagagtaacacataaagcggttgcccaggctgcaaatacagcgaaattgttgtcagccagttccaaccagtaccgcccccgaaccatgacgcgatggtcgccgggaacagaataatactggaagcgaagattgccgggattacccccgccatattcactttcagcggtaaatgtgtgctctgtgcagcatagacacgacgaccttgctgacgtttggcgtagtttaccacaatacggcgttgaccacgttcaacgaatactacaaagaacgtcactgcaaatactaatactgcaaccaacagcaacacgaggaagtgcaggtcgccttgacgcgcttgctcgatagtatgggcaatggctggcgggagtcccgcaacgataccagcgaagatgatgattgagataccgttaccgataccgcgctcagtaatctgttcgccgagccacatcaggaacatggttcctgtaaccagactgacaacagcggtgaaatagaatgcaaagcctggattcatcaccaggccctgcataccaggcatattcggcaaaccggtagcaataccgatcgactggaatatcgccagcaccagagtaccgtaacgggtgtactggctgatcttacgacgaccagactccccttctttcttaatttctgccagcgttggatgaaccaccgtcaacagctggataatgatcgacgccgaaatatacggcatgatccccagggcaaagatagaagcacggctgagagcaccaccagagaacatgttaaacatttcaatgatggtgcctcgctgttgctcaagcagtttggcaagtacagcggcatcaataccagggatcggaataaaagagccaatacggaacacaatcagcgcgccgataacaaacagcagtctgcgtttcagctcacctaagccacctttggcactttgaaaatctaatcccggttgtttagccatctgctacttattcctcgattttaccgccagcagcttcgatagcagcacgagcgcctttagtaacacgcaggccacgaacagttaccggagtagtgacttcgccagccaggatcactttcgcgaactcgatctggataccgataatgtttgccgctttcagcgtgttcaggtctacaacgccgccttctactttcgccaggtcagacagacgaacttcggctgtaatcgctgctttgcgagaagtgaagccgaatttcggcagacgacggtacagaggcatctgaccaccctcgaaaccgcgacgtacgccaccgccagaacgagacttctgacctttgtgaccacgaccaccggttttaccgaggccagaaccgataccacgacccaggcgtttacccgcctttttggagccttcggccggagacagagtatttaaacgcatctcttactcctcaactttaaccatgaaggaaaccgcgttgaccataccacgaacagcaggagtatcctcgcgctctacggtgtgaccaatacgacgcagacccaggccaagcagcgttgccttgtgtttcggcagacgaccgattgcactgcgggtttgagtaattttaatagtctttgccatggtttatttccccagaatttcttcaacggatttaccacgcttggcagcgaccatttctggagaattcatattttccaggccatcaatagttgcacgaaccacgttgatcgggttggtggaaccgtatgctttagccagaacgttatgaaccccagcaacttccagaacggcgcgcattgcaccaccggcgatgataccggtaccttcggaagctggctgcatgaatacacgagaccccgtgtgaacacctttaaccgggtgctgcagggtgccgttgttcagcgcgacgttaatcatattgcgacgggctttttccatcgctttctggatcgctgctggaacttcacgcgctttaccgtaaccaaaacctacgcgaccgttaccatcgcctactacagtcagagctgtgaaggagaaaatacgaccacctttaacggttttagatacgcggtttaccgcgatcagcttttcctgcagttcgccagcttgtttttcgatgtgagccatcttacacctctaccttagaactgaaggccagcttcacgggcagcatctgccagtgcctggacacgaccatgatattggaacccggaacggtcaaaggacacatctttgatgcctttttccagagcgcgttcagcgacagctttacccacagctgcagccgcgtctttgttaccggtgtacttcagttgttcagcgatagctttttctacagtagaagcagctaccagaacttcagaaccgttcggtgcaattacctgtgcgtaaatatgacgcggggtacgatgtaccaccaggcgagttgcgcccagctctttgagcttgcggcgtgcgcgggtcgcacgacggatacgagcagatttcttatccatagtgttaccttacttcttcttagcctctttggtacgcacgacttcgtcggcgtaacgaacacccttgcctttgtaaggctcaggacgacggtaggcgcgcagatctgctgcaacctggccgatcacctgcttatcagcgcctttcagcacgatttcagtttgagtcggacattcagcagtgatacctgccggcagctgatggtcaaccgggtgagagaaacctaaagacaggtttactacattccctttaaccgctgcacgataacctacaccaaccagctgcagcttcttagtgaagccttcggtaacaccgataaccattgagttcagcagggcacgcgcggtaccagcctgtgcccaaccgtctgcgtaaccatcacgcggaccgaaggtcagtgcattatctgcatgtttaacttcaacagcatcgttgagagtacgagtcagctcgccgtttttacctttgatcgtaataacctgaccgttgattttgacatcaacgccggcaggaacaacgaccggtgctttagcaacacgagacattttttcctccgattaggctacgtagcagataatttcgccaccaagaccagcctggcgcgctgcacgatcagtcataacacctttagaggtagaaacaactgcgatacccagaccggccataactttcggcagctcatctttacgtttgtagatgcgcagacctgggcggctgacacgctgaatgctttctacaacagctttaccctggaaatacttaagagtcagttccagttccggcttggtgtcgccttcaactttaaaatcttcaataaaaccttcttccttcagcacgttggcaattgccactttcagcttggaggaaggcatggtgaccgcagctttgttcgcggcctgaccgttacggatacgggtcagcatatccgcgatcggatcttgcatgctcatctgtctttactcccgtgattcaattggtgacaattaccagctagcctttttcagacccggaatttcaccgcgcatagcggcttcacggaccttaatacggctcaacccgaacttccgcaggaaagcgtgcggacgaccagtttgacggcagcggttacgctgacgtgacgggctggaatcacgcggcagagtctgcagcttaagaaccgcattccaacgatcttcgtcggttgcgttcacatcagagatgatcgctttcagttcagcgcgtttcgcgaagtatttatcagctaaagctacgcgttttacttcgcgtgctttcattgattgcttagccatttagtaaccctaccttacttgcggaacgggaagtcaaaggcagccagcagagcacggccttcttcgtcagatttcgcagtagtggtaatggtaatatccaaaccacgaacgcggtcgactttatcgtagtcgatttctgggaagatgatctgctcacggacacccatgctgtagttaccacgaccgtcgaatgacttagcggacaagccacggaagtcacggatacgaggaacagcaatagtgatcaggcgctcaaagaactcccacatgcgttcgccacgcagagttactttacagccgatcggatagccctgacggattttgaagcctgcaacagatttgcgtgctttggtgatcaacggtttttgaccggagattgctgtcaggtctgctgctgcgttatccagcagtttcttgtcagcgatcgcttcaccaacacccatgttcagggtgatcttctcgacccgagggacttgcatgacagaattgtagttaaactcagtcatgagtttgttaactacttcgtctttgtagtaatcatgcagtttcgccatcgtactactccaaattacttgatagtttcgctgttagacttgaagaaacggacttttttgccgtcttcgaatctaaagcctacacggtcagccttgccggttgccgcattgaagattgcaacgttagaaacctgaattgcagcttctttttcaacgatgccgcccggttggttcagagccggaaccggcttctggtgtttcttaaccaggttgataccttcaacaatgaccttgccggaagacaggacattcttaactttaccgcgtttacctttatctttaccggttaacacgataacttcgtcatcacgacggattttcgctgccatgattcgctccttagagtacttctggtgccagagagataattttcatgaacttctcgttacgaagttcacgagttaccggcccaaaaatacgcgtaccgataggctgctcgctgttattgtttaaaataacgcatgcattaccatcgaagcgaatgacagaaccgtccgggcgacgaacacccttcttggtgcgcaccactaccgccttcagcacatcaccttttttgaccttaccacgcggaatcgcttctttgatggtgatcttaatgatgtcgcctacgcctgcgtagcgacggtgcgagccacccagaaccttgatacacattacgcgacgtgcaccggagttgtcggcgacgttcagcatagtctgttcttggatcattttagtgctccgctaatgtcaactactactgagacccgaaaatcaggtcgttaaaaaaaccccatatcgagggcgcggcattataacaccgcaaatcagatatgggtagaaaaaataaacggcccatcgctgagccgtttattcgttgagaatgcgtactgtattacagaaccgctttctctacaacgcgaaccagagtccaggatttggtcttggacagcggacggcattcgcggatttcaaccacgtcgccgataccgcattcgttgttctcgtcatgtacgtgcattttggtcgtacgcttgatgaatttaccgtagatcgggtgtttcacaaaacgttcgatagcaacaacaatggatttctccattttgtcgctaaccacgcgaccttgcagagtacggattttatcggtcattacgcacccgccttctcagtcagtaaagtcttaacgcgtgcgacatcacgacgcacttgcttcaacaggtgagactgttgcagctggccacttgcagcctgcatacgcaggttgaactgctcacgcagcaggttcagtagctcggtgttcagctcttcaacgctcttctcacgcagctcttttgctttcattacatcaccgtcttagttacaaaggtggttttaatcggcagtttcgctgctgccagcttgaatgcttcacgggccagctcttccggtacgccgtccatttcatacaggactttacccggctgaatcaaggcaacccaatactccacgttacctttacctttacccatacgcactgccagcggcttttcagtgatcggtttgtccgggaatacacggatccagatcttaccttgacgcttaactgcacgggtcatagcacgacgtgctgcttcgatctgacgggcagtcagacgaccacggccaacagctttcaggccgaagctgccgaagctaacatccgcgcctgcagccagaccacggttgcggcctttgtgcattttacggaattttgtacgctttggttgtaacatcagcgacgctccttatttacggcctttacgctgctgctttttcggttgagcagccggtttttccggttgttcaacagcagccataccacccaggatctcgcctttgaagatccacactttaacgccgattacaccataagtggtgtgcgcttcagaggtgttgtagtcgatgtcagcacgcagagtgtgcagcggtacgcgaccttcgcggtaccattcggtacgtgcgatttccgcgccgcccagacggccgctaacttcaactttgatacctttagcgcccagacgcatggcgttctgtacagcacgcttcatcgcacgacggaacataacgcgacgttccagctgagaagtgatgctgtcagcaaccagtttagcgtccagttcaggtttacgaacttcggcgatgttgatctgtgcaggaacgccagcgatatccgctacgaccttacgcagtttttctacgtcttcaccttttttaccgataacgatacccgggcgagcggtgtgaatagtcacacggatgctcttagccggacgctcgataacgatacgagatacagacgctttagccagttccttcgtcaggtactgacgtactttaaaatcgctgtccaggttgtcagcgaattctttggtgttcgcaaaccaggtagagttccatggttttacaatacccaggcgaataccattaggatgtactttctgacccattgctagtctccagagtctcagcgatcggacacaaccacagtgatgtggctggtgcgcttcaggatgcgatctgcacgaccttttgcacgcggcataatgcgcttcatgctcgggccttcgtctacgaaaattttcgtaactttcagatcgtcaatgtcagcgccatcgttgtgttcagcgttagcaatggcagattccagaactttcttgaccagtacagccgctttcttgttggtgtaggtcagaatatccagagcctgcgacactttcttaccgcgaatcaggtcagcaacaaggcgaaccttctgagcagaagaacgagcatggcgatgtttagcgatagtttccatctcttcctcctaccttatttcttcttcgcttttttatcagcagcgtggccgcgataagtacgagtcggtgcgaattcacccagtttgtgaccgaccatttcgtcggaaacaaataccggaacgtgctgacgaccattatggacagcgatggtcaaaccgatcatgttaggaaagatcgttgaacgacgggaccaagtgcgcaggggcttcttgtctccgctttccaccgctttctctaccttcttcagcaagtgcaggtcaataaaaggacctttcttgagagaacgtggcatggcttatcctctaaaattatttgctacggcgacgtacgatgaatttatcagtacgcttgttgctgcgggtcttcttacctttggtctgaacgccccacggagttaccgggtgcttaccaaagttacgaccttcaccaccaccatgtgggtggtctactgggttcatcgcagtaccgcgaacggtaggacgaacgccacgccagcgtgcagcacctgctttacccagaacgcgcagcatatgctcagcattgccaacttcgcccagggttgcacggcagtctgcttcgactttacgcatttcaccagaacgcagacgcagggtgacataagcgccatcgcgagcaacgatctgaacgtaagtaccagcggaacgtgccagctgaccgcctttacctggtttcatttctacgttatgaacggtagaaccaaccgggatattgcgcatcggcagggtgttgcctgctttgattgcagcatcaacgccagactgaatctggtcgccagctttcaggcctttcggggccaggatgtaacggcgttcgccgtctttgtacagaaccagcgcgatgttcgcggaacggttcggatcgtactcaagacgttcaacaactgccgggataccgtctttgttgcgtttgaagtcaacaatacgataagcctgtttgtgaccaccaccgatatgacgagtggtgatacggccattgttgttacgaccaccggatttgctgtttttttcaaccagcggagcaaaaggtttgcccttgtgcagctctgggttgaccactttaacgacgtggcgacgacccggagatgtcggtttacatttaacaactgccattgtattactcctccgacttactcagcgccgccgacgaagtccagattctggccttctttcagggtgacgtaagcttttttccagtcgctacgacgaccgatacgctgtccgtgacgtttaactttccctttaacgaccagggtgttaacgacttcgacttcgacttcaaacagtttctgcacagcagctttgatttctgctttggtcgcgtctttagcaactttgagaacgatggtgttggttttttccatcgcagtagacgctttttcagaaacgtgcggtgcgcgcagcaccttcagcagacgttcttcacgaatcatgccagcatctcctcaacttgcttaacagcatcagcagtcattacgactttgtcgaaggcgatcaggctaaccgggtcgataccagtcgcatcgcgtacgtcaaccttgtgcaggttacgtgcggccaggaacaggttctcgtccagctcaccggtgatgatcagcacatcttccagagccatgtctttcagtttctgtgccagcagcttagttttcggcgcttctacagaaaacttctcgacaacgatcagacgatcctgacgtaccagttcggacaggatgcttttcagcgcgccgcggtacatcttcttgttaactttttgactgtggtcctgcggacgagcagcgaaggtcacgccaccggaacgccagatcgggctcttgatagaacctgaacgcgcacggccagtgcctttctggcgccacggttttttaccggaaccagttacttcagcacgagtcttctgagcacgagtaccctgacgagcaccagctgcataagcaacaacaacctggtgaaccagcgcttcgttgaaatcacgaccgaaggtagtttcggaaacagtcagcgcgctctgcgcgtctttcaatactaattccattgctatccccttacgccttcacagctggtttaacgatcaggtcgcaaccggttgcacccggaacaccacccttaaccagcagcaggttgcgctcagcgtcaacgcgtactacgtcaaggctctgaacggttacgcgctcattacccatctgacctgccattttcttgcctttgaacactttgcccggagtctggttctgaccgatagaccccggaacgcggtgagacaaggagttaccgtgagtagcgtcctgggtacggaagttccagcgcttaacggtaccagcgaaacctttacctttagaggtaccggttacgtcaacttttttaacgtcagcaaacagttcaacgctgatgctctgacctacggtgtattcttcgccttcagccagacggaattcccacagaccacggccagcttctacgccagctttagcaaagtgacccgcttccggcttggtgacacggttagcttttttagcacccgtagtaacctgaacagcgcggtagccatcgttagccaggtctttaacctgagtaacacggtttgcttcaacttcgattacggttactgggatagagacgccatcttcagtgaagatgcgggtcatacccacttttttaccgactaaaccaatcattgtatcaacctctcaatcgctcgatgacctgattaacccaggctgatctgcacgtctacaccggcagccaggtccagacgcatcagagcatcaacggttttctcggttggctcaacgatgtcaaccagacgcttgtgagtgcgaatttcgtactgatcgcgcgcatctttgttaacgtgcggagagatcagaacggtaaagcgctctttgcgggtcggcagcgggatcggaccgcgaacctgcgcaccagtgcgcttggcagtctcgacgatttccgcggttgattgatcgatcagacgatgatcaaacgctttcaggcggatacggattctttggttctgcatgagaccagagctccaattattttataaacgaaaatgattactcctcacacccattacgattgatgggagagtgtaaccgttcttacgtagctccccgattgggagcattgttaaatagccaaatcggctattcgaggttcaaatcgaacctgccgtcaattacgacaagcccgcgcattatacgtaaatctcagcctgacgcaagtgtcggatagaaattaagcgctttattcttatgcgagcacgattccagatggtacgcatgggatggcgacgcgcatcttttctttggaaggcatcaggcaaacctggcaatacgtcgttgtcgctgtcgcataaatctataaaggtgagcgcaagccttgacgaggatttgcttatgtttgttgccctcccctttctcattttttatgcgtcgttctctttattacttggcatatacgacgcgcgtaccggtctgctgcctgaccggtttacttgtccattgctgtggggtggtctgctttatcaccagatttgcctgccggagcgtttaccggatgcgctttggggcgctatcgccggctatggcggattcgcgttaatttactggggctatcgcctgcgttatcagaaagaggggcttggatatggcgacgtcaagtacctcgctgccttaggggcgtggcattgttgggaaacactgccgttactggttttccttgccgctatgttggcctgtggcgggtttggcgtcgcgctactggtgagaggtaaatcggcattaataaacccgctaccttttgggccatggctggcggtggcgggtttcataacaggttggaaagttttctttccagacggttaatcggtaaccttaatttgtgattgcagataattttgcataccaagtttggcaatcaaatccaactcagtttccagccagtcgatgtggccttcctcgtcggcaagaatttcaatcatcatatcccggctgacataatcatgaacgctatcggcataggctattgcctcacgtagatcttttgcgccttccagttcgagccggagatccgatcgtagcatctcttcgacatcttcaccgatgcccagcttgcccagatcctgtaggttcggtatgccttccagaaataaaatacgctcaatatacttatcagcgtgtttcatctcatcaatggattcatggtactcaacatcattaagccgggtcagcccccagtttttgaacatacgggcatgaagaaaatactgattaattgcgacaagctcatttcccaatagtttattgagataatttatgattttaacatcacctttcattttatagtccctccgcttccactctctagagcgtagatggggctacagggatgtcaaaaaaaagagtgtgactcaggcgatctctttaaattccggcatttgcgttaactcatcctgcatcacttctcgcgcggcgcgaatacacttaccacattgatttcccacaggaataaatttacgcaactgttgaaatgactgtggatgaaattgtcgtacagcctggcggatttttttatcgcttataccattacacaaacaaacgtacatgatcgctcccgttcaatttccgcacaaagtgtaaatgagaatggttatgattacaatagcacaaagcgatttacgccacgggagaagcgttaaaaagggtgaataaatataacagcggctaaatagcaggcaacaaaaagggcgccgaagcgccctcttcaattcaaaactaattaacgagtaattagcccagaactttagcaacaacgcccgcgccaacggtacggccgccttcacggattgcgaaacgcagaccgtcgtccatcgcgatcgggtggatcagggtaacaaccattttgatgttgtcgcccggcattaccatctctacgccttccggcagttcgatggtaccagtcacgtcagtagtacggaagtagaactgcggacggtagcctttgaagaacggagtatgacggccgccttcatctttggacagaatgtacacttcagattcgaacttggtgtgcggcttgatggtgcccggcttagccagtacctgaccacgttcgatttcttcacgtttgataccacgcagcagaacacctacgttctcaccggcacggccttcgtccagcagtttgcggaacatttcaacgccagtacaggtagacttctgagtctctttgataccaacgatttcaacttcttcgcccactttgatgataccgcgctctacacgaccggtaacaacggtaccacgaccggagatggagaatacgtcttcgatcggcagcaggaacggcttgtcaatcgcacgctctggttccggaatataagaatccaggaagccagccagttcgatgattttcgcttcccactctgcgtcgccttccagcgctttcagagcagaaccacgaacgatcggagtgtcgtcgcccgggaagtcgtactgagacagcagttcgcgaacttccatctcaaccagttccagcagctcttcgtcatcaaccatgtcgcatttgttcaggaacacgatgatgtacggaacgcctacctgacgacccagcaggatgtgctcacgggtctgcggcatcgggccgtcagtcgcagcaacaaccaggatcgcgccgtccatctgagcagcaccggtgatcatgtttttaacatagtcagcgtgccccgggcagtctacgtgtgcgtagtggcgggtcggggtatcgtattcaacgtgagaagtgttgatggtgataccacgcgctttttcttccggcgcgttatcgatctggtcgaatgcgcgagcggcaccgccgtaggttttagccagtacggtagtaatggcagcggtcagcgttgttttaccatggtcaacgtggccgatagtaccgacgttaacgtgcggttttgtacgttcaaatttttctttagacacggctatattccttactatagcgctctccccttcaggagagagcacgggattttggtttttaaccctgcggcttatttaccacgggcttcgattacggcctgagcaacgttgttcggcgcatcatcatacttcaggaattccatagtgtacgatgcgcgacctttggtcagagaacgcagctgagttgcatatccgaacatttcagacagcggtacttcagcgtggatcttaacgcctgtaacttcagattcctgacctttgagcataccacgacggcggctaaggtcgccgataacgtcaccggtattctcttcaggtgtttctacttcaaccttcatgatcggctcaagcagaactggttttgctttcttaaagccttctttaaaggcgatagacgcagccagtttaaacgccagctcagaggagtcaacgtcatggtaagaaccgaagtgcagacgcacaccgagatcaactaccggataaccagccagcgggccagatttcagctgctcctggatgcctttatcaacggccgggatgtattcgccaggaattacaccacctttgatgtcgttgatgaactcgtaacctttcgggttagagcccggctccagcgggtacatgtcgataacaacatgaccatactgaccgcgaccaccagactgtttcgcgtgtttaccttcgatgtcggtaactttcgcgcgaatcgcttcgcggtaagcaacctgaggtttacccacgttagcttcaacgttgaattcacgcttcatacggtcaacgatgatatccaggtgaagttcacccataccagcgatgatggtctggttagattcttcatcagtccatacgcggaatgacgggtcttctttcgccagacggcccagagccagacccattttttcctggtcagctttggttttcggttctaccgcgatggagattaccggctcagggaattccatacgttccagaatgatcgggttttccggatcacacagggtgtcaccggtagtcacgtctttcaggccgatagcagccgcgatgtcgcccgcgcgaacttctttgatctcttcacgtttgttggcgtgcatctgaacgatacgaccgaaacgctcacgtgcggttttcacggagttcagtacggtatcaccagagttaaccacaccggagtacacacggaagaaggtcaggttacccacaaacgggtcggtagcgattttgaacgccagcgcagagaacggctcgtcgtcgcttgcgtgacgctcagccggagtatctttaccgtcgtccagaataccgttgatcgcaggtacgtctaccggggatggcaggtaatcaattaccgcatccagcatcgcctgaacacctttgttcttgaatgcagaaccacaggttaccaggatgatttcgttgttcagaacgcgctgacgcagagcttgtttgatctcttcttcagtcagttcttcaccacccaggtatttttccatcagctcttcagaagcttctgcggcggactcgatcaggttctggtgccattcgttagccaggtcctgcatgtcagccgggatatcttcgtattcgaaggtaacgccctggtcggcatcgttccagttgatggctttcattttcaccaggtcaacaacgccggtgaaaccttcttcagcaccaattgccagctgcagcggaaccgggttcgcgcccagacgggttttgatctgaccaacaactttcaggaagttcgcgcccatgcggtccattttgttaacgaacgcaatacgcggaactttgtatttgtttgcctgacgccatacggtttcagactgcggctgaacaccaccaactgcgcagtaaaccattaccgcaccatcgagaacacgcatggaacgttctacttcgatagtgaagtcaacgtgccccggggtgtcgatgatgttgatgcgatgcggttcatactgcttagccataccagaccagaatgcagtagtcgctgcggaggtgatagtaataccacgctcctgctcctgctccatccagtccatggtagctgcgccgtcatgaacttcaccgattttgtggtttacaccggtgtagaacagaatacgttcggtagtagtggttttaccggcgtcgatgtgcgcactgataccgatattacggtagcgtgcgatgggtgttgtacgagccatttgattcctcgttgatatctttaggcgttcagttaagttatccaaaacgggcgacttacctgaagcgcccgcctggtgactatgactccgaagggattaccaacggtagtgtgcgaacgccttgttggcttctgccatacggtgaacgtcttcacgtttcttaactgcagtacctttgttgtctgcagcatcagaaagttcgttcgccaggcgcagagccatggatttatcaccgcgtttacgagcagcttctacgatccaacgcattgccagagcattacgacggaccggacggacttcaactggtacctgataagtagaaccacctacacggcgggatttaacttctacagtcgggcgaacgttttcgagagcgacttcgaaagcttccagttcagatttaccagaacgctgagccagggtctccagcgcgctgtatacgattgattctgcagtagattttttaccatctaccatcaggatattgacaaatttagccagcagttctgatccgaacttcggatccggcagaattttacgctgaccaatgacgcgacgacgtggcatggaaatactccgttgttaattcaggattgtccaaaactctacgagtttagtttgacattaatttaaaacgtttggccttacttaacggagaaccattaagccttaggacgcttcacgccgtacttagaacgagcttgcttacggtctttaacgccggagcagtcaagcgcgccacgaacggtgtggtaacgaacacccgggaggtctttaacacgaccgccacggatcaggatcacggagtgctcctgcaggttgtgaccttcaccaccgatgtaggaagtcacttcaaaaccgttagtcagacgaacacggcaaactttacgcagtgcggagttcggttttttaggagtggtagtatatacacgagtacatacgccacgtttttgcgggcatgcttccagcgcaggcacgttgcttttcgcaactttgcgagcacgtggtttgcgtaccagctggttaactgttgccattaaatagctcctggttttagcttttgcttcgtaaacacgtaataaaacgccctcacacaatatgaggacgccgaattttagggcggtgtcgaaaaggtgtcaagaaatatacaacgatcccgccatcaccaggccatctggttggcatacttaaccgtgagtctgacaaactcagtatagtcaaccctgacgacactgtctgaaatttgaccacccaggccgcgggcgtcaatgtcttctttcaaggcatagaccgttatgggggcatcgcgcagactttcaaggaagcggttaccttcaatcgcgacggtaacgccatcctggagcagcaaaagcgcatcgccctcttttagcaggcgcagcaaagcgggaaaatcaacgctcgaagcgcaatgaggtaaggtatgcagcataaacgcctcagaatctcaggatgacatcatagttgccaagctcgcggcgtaacgccacgggttccagcggcgtggcgtctaccacaaaattaatgttctccagaccacgctcgcgcagcgatgccgcgcagatccagcattgatcaatatcgtacaaatcaaagagcttgaaagtagcaatatagtcacgcgccagtacagcgtctggtttttgtccgggtaataactgaaagacgccgtcgctgataaaaaagacgcccagcgcttccgttagcgctgacgtcgccagcagcgcatccagcccttcacgacctgaggcgctgccgtgcggcgcggtggaaaagacaaatgcaatacgtttcattaaaactgcaccacccgatcgcaggtgagagatgcctccgccagcgcgcccaggccgcttagcgtaaagcccggctgaagattggcggacggcaacgccaatctgccggcttcagtttcatcaataataccgcgacgaagcgccgccgcgacacagatgttcagcgctacgccatgctgcgtattcaatttctgccaggcgcgtaccagatcatattcatcgctcgccggcgaggtcaggagattggcgttatagacaccttcccgatagaaaaagacgctggctaactcatgcccctcattgagcagcgcgtgggcgaactgcaatgcgctgctggcctgctgggtgccatatgccggcccggtgaccataatggcataacgcattatttatcctgcccctgaaagtcgccgcttttgaactggcgaatatagaggtaaaccgtgtgttttgagatattcagacgatcggctacctggttaatggcgtctttaatatcgaaaatgcctttttcgtacaggttaaggacgatctgacgatttttcgcattgttagaaacattacgatcggcattcacttcttcgatcgtgaactccagcgtctgggtgactaaatcttcgactgaggaggcaaaattaaccgctgagccgacttccggcgtttccggcggaataaaggtattcataatctgtgaaaatggcacatcgagattcatgttgatgcacagtagaccaatgacgcgctgctcgcggttgcgaatggcaatcgtcaacgacttcatcaagacaccgcttttcgcgcgcgtgaaatagcatttcgacacgctactgtccgcccctgtcatgtcgtgcaacatacgcaacgccaggtcggtaatcggcgagccaattttacggcccgtatgttcgccattggcaatacgaatggctgaacattttagatcctgcaaagagtgcaatacgatttcacaatgggaacctataagcatcgctaacccgtccactaccgcttcgtaggatttcagaatatcgaagtcggtttgctcgaagggacgctgatccagcaaatcaagttcactggtttcgttggttaaaagcgacctggacatgaaaaaaaacactccttttcaggagcctgtcgttatgttttcagggcaggctcattatttacgcggatgattaaattaatacagtgagggttcatctttccagtactaatttgctcgtctatttcagactacgtgtgcgttggcggtcattcagcctacggtctcgcccttaacgaccagcgcaagcgccgttatccgcaaatcaaattatggtgagtaatatatccggcctgaataaaaaaaaccgccgctattacaagcggcggctctcagtttttattttttagcagcatctgcggctttagcgtcagccgcatcggcaggtttagcatccgctttcggcgctggtttgatatccagcagctctacgtcgaataccagggttgagtttgccgggatccccggaacgcccgttttaccgtaggccagctcaggtgggataaccagcttgatcttgccgcctttcttaatatttttcagaccttcagtccagccagggataacgccgtccagacggaaggagagcggttcgccgcgcgtgtaagagttatcaaactctttaccgtcgatcagagtacctttgtagttcaccacaacggtatcgctatctttcggcgcctcgcctgtgccttctttctctactttgtaaagcaggccggtagaggaggttttcacacctttctctttagcaaaagcgtcgcggaacgttttaccttttgcttcgttatcggcagcgtctttttccatcttcgcctgagcagcgctcttcacgcgtgcttcaaacgtctgcagcgtttgctcaatttcctgatcggacagtttgctcttatcggcaaaggcatcctgaacgccggcaatcaactgatctttatccagtttgatgcctaacttttcctgctctttaagcgaattttccatgtaacgacccagcgaggcgcccagcgcataagccgctttttgatcgtcgtttttaaatgctgctttgctatcagcggtagctgccggtttcgccgcatcagcagcaaaagtgatcggtgcgtgcatagcaacggccatcgtagttgccagcagcgtggctttaaacagtgatttcatccatatctccagggccggggcatctcgccccatgttaacttacgtaagaagcgtactataaatcgttgcagaacaaatcaacatacgaacacgccctattatcacttcttttcagactctttttgtttaaattagtttcgtagtgcgcgtaatggttgctgtgaaagccggtaaagttaagtagaatccgccgacggagacaacataaagaggtacatcatgcaggatatcacgatggaagctcgtctggctgaactggaaagccgtctggcgttccaggagattaccatagaagaactaaacctgacggtaaccgcacatgaaatggagatggcgaagctgcgcgatcatctgcgtttgctcacggaaaagttaaaagccagtcagccgtcaaatatcgcctctcaggcagaagaaacgccgccgccgcattattgagacgaaaaaaagcggggttaacccgctttttttgtgcccgatgatttatcgaaccaatgataataccctaaggatttcgagtcacagcaaggctgcaagcttgaaaattccccgggagcatagataactatgtgaccggggtttgaaagcgtagccaacaccgcggtggcttgaaagacgacggggattaatggcagccgcagccgcctttaccaccaccgccgcagcagccttcgccgccgtgctcgtgaccatggtcatgaccatgaccgccacagcagccgtcttcaccgtgatcgtggtggtgatcgtgcgcgccatgaacatgaccgtgagccagttcttcttcagtcgcttcacgaatcgcaacaacttctacgttaaatttcagattctggcccgccagcatgtggttaccatcaaccacaacgtgatcgtcttccacttcggtaatctctaccggtaccgggccctggtcggtttccgccaggaaacgcatccctacctgcagttcatcaacgcccataaagacgtctttaggcacacgctgcaccagattttcgtcatactggccgtaagcgtcgttcgcgccaacagcgacatcaaatttgtcgccaacttcatggccttccagcgcggtttccagaccagagatcagggagccgtgaccgtgcaggtaatccagcggcgcactcaccggagactcatcaaccaacacaccgtcttctgtacgtacctgataggccaggctgaccaccaggtcttttgctactttcatgatatctcctgagcatgggaagaatagtggcgcagattgtagcggaattctgcagccgtgtaccccttagcttaaaaaaacctgcggcatatcgctagtccggatgaaaaatcccgatcacttgctcttctttgcgaacatgctcgcggacgtctttatccgcttcccgcatttgatgcccgcacttaacgcattcaacaatatcgacattattttcacgccacatcgccattgtatcctgcgcctgacaggccggacatttcgcgcctgcaataaaacgtttacggattgccattgttttacccctactcaaattcatcccagccatccaactggcgccgttcctgttgcatttcccgctgaaaaatctcctccagttcgcgtcgggcctctctggcgcgcgaaatctgtaccatgtcgctatgctccgggatcagttcccgcaacattcgcatatccagccgacgaaaatgcaactgcgcgcgttgcgcctgatgcggatgcatacctaacgacaccagagttttacgtcccagttccagcgcgctggaaaacgtttcacgggaaaactgcgtgacgccagcctgtaataactcatgggcctccacacgtccacgcgctcgcgcaagaatatgcagatgaggaaaatgctgctgacacagcgccaccagcttcatcgtgtcttccggttcattacacgtgatgactatcgactccgccgcttccgcgcccgcagaacgcagcagctcgacttgtgtagcgtcgccgtaatacactttataaccatatttgcgcatcagattaacggcgccgatatcgcgttccagcacggtgatacgcatcttattcgccatcaataagcgagcgatcacctgaccaaaacggccaaagccgacgacaatcacctggggcttatcatcctcaacccacggcttttcatcattctcttccgggccattaaggcggcgcgataaccacttatcaatccctttcatcagtagcggcgtggtcatcattgataatgtgacagtcaccaataataacgccatctgatcgccctgaaacaggcgctgagaagaggcggtagaaaagagcacaaaagcgaactcgcccccctgactcagcacgctggcaaactgcatccgttcagaacttcttattccatatagccgcgccagcagatacagcgtcaacatttttatgacgaccagaataacaacgctcgccgccacccacagtaaatgggtataaagtacgccgagatttagcgacataccgacggagataaagaacagcccaagcagtaaacctttaaagggatcgatagcattttccagctcatgccggtattcgctctctgccagtaaaacgccggcaatgaaggttcccagggccatcgacagtcccagcgcatccataaataaggcggcgctcaacaccagcaacagcgtcgcggcagtgaagacctcccgcacgccagacgcagcaataaaacgaaataccgggcgcagcaggtaacgaccgccaatcagcattaccgcgaaagccagtaccttcattgccactttaaaccagtcgaaatgctcgtcggccgatcccgccaataaaggcaccaacgccagtgcggggatcaccgctaaatcctgaaacagtaagacggaaaaccctaactgcccggactcgctacgattcatgcctttctcgcgcatcagttgtagcgccatcgccgtcgaagacatcgccaggccaatcccgccgacgaccgccgcctgccataagaaatcagcaagcatcaataatcccgccagcaccgccgcgcttaacagcacctgagcagcgccgacgccgaagatagagcgccgcagttgccaaagccgggacggattgagttcgagaccaatgataaacatcagaaacacgacgcccagttcggaaaagtgcaggatctcgtcaacgtcgctgataaatcccagcccccacggaccgatggcgattcccgccagcaaataccctagcaccgcgccgatgcccagcctggcggctaacggcaccgccgctaccgctgcgaagaggaacaacactcccgcggtcaataaatcagcaccttccatcaatagcctcccgcgctcacaggattcgccagccactcgccataggctttcgcatgactggccagcgtctgcggcgactggcggcgcgcccagtacacaataatgggcggcatccagtgcatccggcacatggccgcggtcagttcaaaagggcggagtacatcgctcattggatagcggtttagcgcgtcataccggtaagcgctctccggctcgccggtcgtaatcacgctacgccagtactttcccaccagttggtttccccctggtccgctggcgaacccccgactcaaaacgcgatcaagccattctttcagtaaagccggacagctataggtgtaaaggggatgctgaaaaacaatgacgtcgtgctcacgtaacagggcttgttcatagggcgtgtcgataaaaaaatcaggatagcgcgcataaagatcgtgcacggttacgttattgtgctgtatggccggtttaagcagtacccggttagcaaccgagtcctgagattccggatgggcatacaacagcaagactttcgctggctgagacatcaatccccctcccggttgttttgggtcgatacatgccattcttcaggccgcttctacgttgacagcgtttgttcaactcaggaacgtactctatgtccgccgctggggattaatgagagatattcttgtccctcaccaaaggcggcctgaatgattttgtgtatcgttgttgttttgagctaccattgcgctccagcgcggcggtacgcccgaatattacattatcataatgataaattaacatagtctgaacatacggcgccttatgattgttttctcctcgttacaaattcgtcgcggcgtgcgcgtcctactggacaatgcctcggctaccattaatccaggccagaaagtcggcctggtgggtaaaaacggctgcggtaaatctaccctgctggcattgctaaaaaatgaaatcagcgccgatgccgggagttttaccctgcccggaacctggcaattagcgtgggtgaatcaggaaacacctgcgttgcctcagccagcgattgagtatgtcattgacggcgaccgtgaataccggcagctggaggcgcagcttaacgacgccaacgaacgtaacgacggacatgctatcgcctccatacatggcaagctggacgccatcgacgcatggaccgttcgttcgcgcgccgccagcctgctacacggtctcggcttctctaacgatcagctggaacgtccggtcagcgacttttccggcggctggcggatgcgccttaacctggcccaggcgctgatttgccgttccgatttactgctgctcgacgaaccgaccaaccacctcgatctggatgccgtcatctggctggaaaaatggctgaagagctatccgggcaccctgattctgatctcccacgatcgcgactttcttgacccgatagtggataaaattatccatatcgaacaacagactctgttcgagtacaccggcaactacagcgcgtttgaagttcagcgcgccacgcgcctggcgcaacagcaggcgatgtatgagagtcagcaggagcgtgtggcgcatctgcaaagctacatcgaccgtttccgcgctaaagcgaccaaggccaagcaggcgcaaagccgtatcaagatgctggagcgtatggagctgattgcgccggctcatgtcgacaacccgttccatttcagcttccgcgcgccggaaagcctgccgaacccgctgctgaagatggaaaaagtcagcgcaggttatggcgatcgcatcattctggaatccatcaagctgaacctggtgcccggctcgcgtatcggcctgctgggtcgcaacggcgcggggaaatcgacgctgatcaagctgctggcgggcgaactggaaccgttgcacggtgaaatcggcctcgccaaaggcattaagctcggctacttcgcccagcaccaactggagttcctgcgcgccgatgaatccccgctgcaacatatggcgcgtctggcgccgcaggaactggagcagaagctgcgcgactatctcggcggcttcggtttccagggcgacaaagtaacggaagagacgcaacgtttctccggcggcgagaaagcgcgcctggtactggcgctgatcgtctggcagcgtccaaatctgctgttgctcgatgaaccgaccaaccacctggatctcgacatgcgtcaggcgctcaccgaagcgctgattgatttcgaaggcgcattggtcgtcgtgtcgcacgaccgccacctgattcgctccaccactgacgacctctatctggttcacgacaaaaaggtcgaaccgttcgacggagacctggaagattatcagcaatggctgagcgacgtgcagaaacaggaaaaccaggccgacaacgcgccgaaggaaaacaacgccaacagcgctcagtcacgcaaagatcagaagcgtcgcgaagccgagctacgcactctgacgcaaccgctgcgtaaagagattacccgtctggaaaaagagatggaaaagctcaacgcccaactggcgcaggcggaagagaagcttggcgacagcagcctgtatgacccaagccgtaaagcggagatgaccgagtgtctgcaactgcaggccagcgccaaatccgggctggaagcgtgtgaaatggcatggcttgaggcgcaggagcagcttgagcagatgatgcagaacgactaagagcctatcccattaggctattttattcgccattttagggccgggcagtgctcgaaatcctcacgtactatgtgtacgctccggtttctgcgcgctgtccggccccaaactggcttcaacaattacgcctacggggataggctctaacgcacggggcggacgatgaacctgtctatcaccgatgacattaccttccgcaagctcaccatcttaatgatgcttgtggagaagggcaacatcgcccgtaccgccgaggcgctaaacacgctggaagagaacgttcgtggtccgctgttcgtccataaaggcctcttaggtactcgccccggtataaagattaccgttgcggtcagcagcaccggaacagaagcctgcgttatgtgatttagcggcaaaggttgccgtgatttattttcgtcagcgcgtcgttcacgccaaataatgtaaacgtcacctcatcaacgccaagatttttcagacgcgcagtgtgttttttaatataagcctgcgccgtttcttcggattcaaacaagtaaataccgccagcttgctggtttttctcgctttctgtccagattttccagatgaagcccggctcctcattgatagactccgccagcccgaccagttgctgagtcatctcctcgccaaaagggccgctaaagttaaaatggatctgtaaaagtgtcttcgacatgccttctccttgagtcgcataactatcgtgttgccacactaccacgattaattcggctgatgcagaggttcacgcgatttctgtggggtattgcgcgcgccttgcatactgccctctctggtgaaatgaggcgcaattttatttcgccagacgaccaattgaacgtaaaatcacatattgactaatctgtgaaccttatgcgcggtatagtattgtttccaattatcaattgttctggtgctatggttgagatcacgtccacagaaatgaccccgcctgtcaatgactcgcatgaatttattcccatgcgtggcattcgtaatcgccatttacaaactatgctgccgcgtttaatccgccgcaaagtgaagttcaacgcccactggcagcggctggagctaccggacggcgattttgtcgatctggcatggagcgaagatccgcaacaggcaaagtataaaccgcggctggtggtctttcacggtctggaaggcagcctgaacagcccctatgcccacgggctgattgaggcggcgcaaaagcgcggctggctaggcgtggtgatgcactttcgcggctgtagcggcgagcccaaccgtctgaatcgtatttaccactccggtgaaacggaggatggagcctggtttttacgctggctacagcgggagttcggcgccgttccgacagccgccgtgggctattcgctcggcggtaatatgctggcgtgcctgctggcgaaagaaggccgcgatattcccatcgaggcggcggtaattgtttctgcacctttcgttctcgaagcctgtagctaccacatggacaaagggttttcccgcgtctatcagcgttatttgcttaatctgttaaaagcgaatgcgtcacgcaagctggcggcgtaccccgggtcgctgccggtgaatctggcgcaactgaaatcaatgcgccgtattcgcgagtttgacgacctgatcaccgcgaaaattcacggctttgccgacgccatcgactactatcgtcagtgtagcgccatgccgttgcttaaccagattgctaaaccgacgctgattattcacgctaaagacgatccgtttatggatcatcatgtgatccctaaagcggaagatctgcccccgcaggtggagtatcagctgactgagcatggcggacacgtaggatttatcggcggtacgccgttgcgccctgaaatgtggctggaacgccgaattcctgactggctgacaacgtacctggaggcgtcatcatgatcattccctggcaggggctcgcccccgacacgctggacaacctgatcgaaagctttgtgttgcgcgaaggcaccgattatggtgaacatgaacgttcgcttgaacaaaaagtcgctgacgtaaaacgccaactgcaatccggcgaggccgtgctggtatggtctgaattacatgaaacggtcaatattatgccgaaaaagcagtttcgcgaataaaacgcctttgccgacaatacattattactaaagctcaatcatggagttgccatgtcagccaaacatccggtgatagcagtaacagggtcaagcggcgcggggaccaccaccaccagcctcgcgtttcgtaaaattttcgcgcagttaaatctgcacgccgccgaggtggaaggcgacagttttcatcgttacacccgcccggaaatggatatggcgatccgcaaagcgcgtgacgccgggcggcatatcagctatttcgggcctgaagccaatgacttcagcctactggaacatacctttattgagtacgggcagacgggtaaaggccagtcgcgtaaatatctgcatacctatgatgaagccgtaccgtggaatcaggttcccggcacgtttacgccctggcagccgctacccgaaccgaccgatgtgctgttttatgaaggactgcacggcggcgtcgtcaccccgcaacatgatgtcgcgcgtcatgttgatctgttggttggcgtggtgcctatcgtcaacctcgagtggattcagaaactgattcgcgacaccagcgagcgcggacactcccgtgaagcggtgatggattccgtggtgcgttccatggacgactacatcaattacattacgccgcaattctcgcgtacccatatcaacttccagcgcgtaccgaccgtcgacacgtccaatccgttcgccgcaaagggtattccctcgctggatgagagttttgtggtgatccatttccgcaatctggaagggatcgattttccctggctcctggcgatgctccagggctcgttcatttctcacattaatacattagtggtgccgggcggcaaaatggggctggcgatggagctgattatgttgccgctggtgcagcgattaatggaaggcaaaaaaatcgaataaccgcggtgaaatgcccgatggcgctacgcttatcgggcctacgagataaaaacgggtaggccggataaagccacgccgccatccggcatcacatgttacgccgcaatcacttcatacgaatgggtaatattgaccgctttttccagcattagcgccaccgagcaatatttttccgcggagagatcgacagcgcgcgcgacggcagcctctttcagatcgctgccggtaacgataaaatgcagattaatgtgcgtaaacaggcgcggcgcgtcttcccggcgctcggatgtcagcttcacttcgcagttggtgacattctgacggcccttttgcaggattgataccacatcaatagcgctacatccgccagccgccattaataccatctccatcggactcggcgctttgtcaccggagttgccatccattaaaatctggtggccggaggaggactctccgaggaacgtgagcccttcaacccactttacacgcgcttgcatatttcgtaactccaatgtttcaattttcctgaaagattacgcgcatacaacaaaagtcgcaatggaaggcgacctgggtcatgctgaagcgagacaccaggagacacacggcgaaagctatgctaaaacagacaagatgctacagtaatacattgacgtactgcatgtatgcagaggacatcacattacaggctacaatctattttcgtagcccccttcccaggtagcgggaagtatatttttgcaaccccagagacagtgccgttttctggctctggagacagcttataacagaggataaccgcgcatggtgcttggcaaaccgcaaacagacccgactcttgaatggttcttgtctcattgccacattcataagtacccgtcaaagagcacgctgattcaccagggtgaaaaagcagaaacgctgtactacatcgttaaaggctccgtggcagtgctgatcaaagatgaagaagggaaagaaatgatcctttcttatctgaatcagggtgattttattggtgaactgggcctgtttgaagaaggccaggaacgcagcgcctgggtacgtgcgaaaaccgcatgtgaggtcgctgaaatttcctacaaaaaatttcgccaattaatccaggtcaacccggatattctgatgcgcctctcttcccagatggctcgtcgcttacaagtcacctctgaaaaagtaggtaacctcgccttccttgacgtcaccgggcgtatcgctcagacgctgctgaatctggcgaaacagcccgatgccatgacgcacccggatgggatgcagatcaaaatcactcgtcaggaaatcggccagatcgtcggctgctcccgcgaaaccgttggtcgtattttgaaaatgctggaagatcaaaacctgatctccgcgcatggcaagaccatcgtcgtctacggcacccgttaattccgtcagaatggcgcgttttatcatgcgccatttttgtttgcatcgatgtggcgaagactgatttatcacccagagattaattacgcactacggcaaacgctggtgctgtgcctgcctgtggctgttggtttattaataggccagctacacctgggcttgcttttctctctcgttcccgcctgctgcaacattgcaggtctggataccccgcacaaacgcttttttaaacgcctgatcatcggcgcgtcgctgttcgccggatgcagtctggtaacgcaacttctgctggcggaatccatccccctgccgttgatcctgaccggcctcacgctggtgcttggcgtgacggcggaaattagcccgcttcacgcgcggctactgccagcatcgctgattgccgccatctttaccctgagccttgcgggatacatgcccgtctgggagccgctgctcatttatgcgctgggcacgctatggtacggcgtgtttaactggttttggttctggctatggcgcgaacagccgctgcgcgagtcattgagtttgttataccgtgaactggccgattattgcgaagcgaaatacagcctgctcacccaacatatcgatccggaaaaagcgctgcctcccctgctgatacgccagcaaaaagcggtcgatctcattacccagtgttaccaacagatgcatatgctttcggcgcacaacaataatgattacaagcgtctactacgggcttttcaggaagcgatggatttgcaggagcacatctccgtcagcttgcatcagccggaagaggtacagaaactggtagaacgcagccatgcggaagaggtgattcgctggaatgcgcaaacggtcgccgcccgtctgcgcgtgctggcggatgacattctttatcatcgtctgccgacgcgcttctccatggaaaaacagattggcgctctggagaagatcgccaatcagcatcctgaaaatccggtaggccagttctgctattggcacttcagtcgaatcgcccgtgtgctgcgtactcagcgaccgctgtacgcccgcgacctgatggccgataaacagcgtcgtttgccgctacttccggcgctgaaaaattatatgtctcttaaatcgccggcgctacgcaacgccggacgcatcagcgtgatgatgagcatcgccagtctgatgggcagtgcgttgcacctgcctaaaccgtactggatactcatgacggtgctgtttgtcacccaaaacggctatggcgcgacgcgcgtacgtattctgcaccgttcggtcggaacgctggtcggcctggtgattgccggcgtcacgctgcacttacatattcccgaaagcattacgctggcggtcatgctggtactaacgctggcaagttatctgattattcgtaaaaactacggctgggcgacggtcggctttacggtgacggcggtatacaccatccagttactgacgttaaacggagagcagtttattgtgccgaggctgatcgatacgctgattggctgtttaattgcctttggcggcatggtctggctgtggccgcaatggcaaagcgggctattacgtaaaaacgcccatgatgcgctggaagccgctcaagaagctatccgactgatcctcagtaacgatccgcaggccaccccgctcgcttatcaaagaatgcgggtcaaccaggcgcataacacgttattcaactcgttaaatcaggcaatgcaggaacccggattcaatacccactatctgtcggatatgaaactatgggtcacgcacagccagtttattgtcgagcatatcaacgctatgacgacgctggcgcgggaacacaccatgctgacgccggatctggcgcagcgctatctggaatcttgcgagattgcgattcagcgctgccagcagcgcctggagtacgacaggccaggcggctccggcgatgtcaatattctggagtcgccggacatgccgtcacatggcttattgagcactctggaacaacatttacagcgcatcatcggccatctgaacaccatgcacaccatttcgtcgatggcctggcgtcagcgtccgcatcacggtatctggctgagtaagcggctacgggatacaaaaggttaagaccgaccgccggatgcgctacgcttatccggcaatccgccatcaggccaccaccttccctaccgcctgcgcaaagcgctgcattccttcatggatatccgcctcttccaccaccagcgacggggcaaaacgcatcacgtcggctccggcattgagcaccatcacgccggcctccgcgcctgcgtacagaaaatcgcgcgcccgacctttgtacttcggcttcagttccgcgccaatcagcagccccatgccgcgaatatcgctgaaaatgtcaaattgctcgtcaatcgcctgcaaatgttgcacaaactgttgccgcttagtgtgaatgccttgtagtacctctggcgtattaataatatcgaatgccgcgccagccaccgcacaggccagcggattgccgccataggttgaaccatgcgaacctacatggaaggccgaggctatttcctgcgtggtcagcatggcgctcaccggaaaaccgccgcctaacgctttggcgctggtgaggatatccggcgtgacgccgtagtgcatataggcaaacaggtctccggtgcgccccatcccacactgcacttcatcaaacaccagcaacgcctgatgctcgtcacacaggtcgcgtaaccctttgaggaattccggtgtagccgcctgcacgccgccttcaccctgaatcggctcgaccaccaccgcgcaggtgtggtcatccattaccgctttcaccgcatgaagatcgttgaagggaacgtgaataatatcggcgggtttcggcccaaagccgtcggaatatttcggctgcccgcctacagagacggtaaacaaggaacggccatgaaaagcgttatggaaggcaatgattttcgttttgaacgggctatggcgcacgcaggcataatgacgcgccagtttaaaagcggtttcgttcgcttcggtgccggaattcataaacagcacgcgctcggcaaacgtggcgtcgatcagtttacgtcccagacgcaacgctggttcattggtaaaaacgttactggtatgccacaaggtttccccctgggatttcagcgcctcgaccagcgccggatggcaatggcccagcgcagtcactgcaatcccgccggcgaaatcaatatactctttgccctgctgatcccatactcggctgcctttacctttgaccggaataaagtccgccggtgcataaacaggcagaatcacctcatcaaaagttgcgcgcgtaatagccgtttgttcagttgccatatcattaccacccggttaagtagaaatgccagtgaaattataatcacaaaatatgaataaaaaatcactcaatagcaaccacaaatcaacgccggaggaaatttttcagcagagcgtgtccttgttcgctgagaatactttccgggtggaactgcacgccttccagatcccactcgcggtggcgaatgcccataatctcctgcgtttcgctccaggcggtgatctcaaaacactcaggcaacgtggcagggtcgacaatcagcgagtggtaacgtgtcacggttaacgggctgggcaatccccgaaacacgccctgtccattatgcgtaacaggtgacgttttaccgtgcatcactttcgctgcccgcactaccgacgcaccaaaggcctgcgccatcgcctgatgacccaggcaaacgcccagcatcggaatacgtccggcataatggcggatgaccgccagtgaaatgccagcgtcattcggcgtacaggggccaggagagataacgattttttgcgggttcaaagcgtcaatgtgcgccagcgttagcgcatcattgcgccggacctgcacttccgcgcccagttcacaaaaatactggtagaggttccaggtaaaggaatcatagttatcgataagcaggatcatggcggctccgggtgagtagaaccgcactattttactcagtttcgcgagcttcgcttatcgctttctgaaaaatcgcccgcaaagcggagagatcgcccatcgcgccgctctggttcgcctgcttccatgtttcaaccgcaataccttgccaactcagcgcgtagcctgcatgtagcgccagttgttcaaagaagatgcgctgcgccaacccgctcccaaaacgaaacggatgaagcacattaatttcacagtagtaatgcgccagccgctcgacaaacttctcgtgcgccagaccaaccaggtagccctcttcttccagatcctgcatcagagcgttgccctctttttcgatataggcaaagtggcaaaaacgggtatcgccctggtaaatatcgacctcccgcagttgccctgcccagtcgaaaatatcctgatagagctggcgatgaatcgcgcacagatgaggcaagccgcgtaccagcggccccagttcaatcgtagcggcgcggagcgcggtcatttcgtatgccgcttgcgccagtcgctgggcctgatgaatccccagccgattacgcatcacattcagccccggatagaggtacggatcgcgtccttcgccaaatttatcgctcatagtgcctccgaagctcgtcaagacgtaccagcgcttcgtcggcagtcagggttactaaggggatctcaataccttcgagacggcggctttgctggaagttaacgttgcgccgttgctcccaaaagcgtgacttttgtttatcggtaagtttcttcacctggcctccctgaatatgcctgtgcttgaccacaagtataagcagcaatttcaggttacgctgagacagggagaaaacgcgggcggctcgcacccgcgcaggcatgttttatggcaggactttcgcggaaaggataacgactggttttgtcggcacattctgataaggcccgacatcgtgcgtcggtacctgtgagattttatcggcgacatccataccttttaccactttaccaaataccgcatagccaaagtcgcgctggccgtggtcgagaaaagcgttatccgcgacgttaataaagaactggctggtggcgctgtctttatctgcggtgcgcgccatcgcgatcgtgccgcgagtattacgcagaccgttgtcggcttcattcttaataggcggattcggtttcttctgctgcatctgctcgttaaaaccaccaccctgaatcataaagccaggaataacgcggtgaaacgtagtgttgttatagaaaccactgttgacgtaatcgacaaagtttttcacagaaaccggcgctttctggctgttcagctccagctcaatattcccggcggaggtggttaacagcacatgaggatcgccttttgctgccaacgctgcgggagaaagagcagaaagagcgaaaacagctgcgacagccgccagagtcgatttgagcatgagatttccttaaagagagcagaaataaagcaagtggaatgattttaaagagccttcctgggccaggccagccctttacctaattttacgtatatgaaacaaatgtaacgttacgacgcaacgccgtattcttgcaatatgatgtgacaaacatcacattaaaaaatgcaatgaacattactatcactaataattatttaaatgcatcacaaaagcgcctaaaatctgcccgcttaacgcgccctccacgcgcttcacttctcttcaaggccagacatgactaacagcaaccgcatcaagctcacatggatcagctttctttcctacgccctgaccggggcgctggtgattgtcaccgggatggtgatgggaaatatcgcagactattttcatctgcccgtttccagcatgagtaacacctttacttttctgaacgccgggattttgatctcgatcttcctcaatgcgtggctgatggaaatcatcccgctgaaaacacagctacgctttggttttatcctgatggtgctggcggtggccgggctgatgttcggccatagcctggcgttgttctcagcggcgatgtttgtgctggggctggtcagcgggatcaccatgtcgattggcaccttcctgattacgcaactttatgaagggcgtcagcgcggttcccgactgctgtttaccgactccttcttcagcatggcggggatgatttttcctatggtcgccgccttcctgctggcgcgtagtattgagtggtactgggtctacgcctgcatcggcctggtctacctggcgattttcatcctgaccttcggctgtgaatttccggcgctgggtaaacatgcgcagcactctcaggcgcctgtcgtcaaagaaaaatggggcattggcgtactgtttctggccgtcgccgcgctgtgctatatcctcggtcaattaggctttatctcctgggtgccggaatacgccaaaggcctcggcatgagcctgaatgacgccggggcgctggtgagtgatttctggatgtcctatatgtttggcatgtgggcgttcagctttatcctgcgctttttcgatctgcaacgcattctgaccgtactggcgggtatggcggcggtactgatgtatctgtttattaccggcacgcaggcgcatatgccgtggtttattctgacgctgggcttcttctccagcgccatttatacctccatcattacgctgggatcgcagcaaacgaaagtggcctcgcctaagctggttaacttcattctgacctgcggcaccatcggaacaatgctgaccttcgtcgtcaccggcccgattgtagcgcacagcggcccacaggcggcgttactcaccgcgaatggtctgtatgcggtggtctttgtgatgtgctttgcgctcggctttgtatcccgtcatcgtcagcatagcgcgccggctacgcattgataatccttgccggatggcgacatcgccctccggcactctatcccccctcctgacggggtaggcctgttggtctaaaaacccctcattttgtatgttatttgtacaaacctgaaaagcctgacaattccgccacttataaaaatccagacaaatcagccatatacccattaagaggtatataaaggtgaatttgatttacatcaataagcggggttgctgaatcgttaaggtaggcggtaatagaaaagaaatcgaggcaaaaatgagcaaagtcagactcgctattatcggtaatggtatggtcggccaccgctttattgaggatctccttgataaatccgacgctagcctgttcgacattaccgtgttctgtgaagaaccccgtaaagcctatgaccgtgtccacctgtcatcctacttctctcaccacaccgcggaagagctctctctggtgcgtgaaggattttacgagaagcacggcgtaaaggtactggttggcgaacgcgcaattaccattaaccgtcaggagaaagtgattcactccagcgcgggtcgtaccgtttattatgacaagctgatcatggcgaccggttcctatccgtggatcccgccgattaaaggctccgaaacccaggattgcttcgtttaccgtaccattgaagacctcaacgctatcgaagcctgcgcccgtcgcagcaagcgcggggcggtggtcggcggcggtctgctggggctggaagccgctggcgcgctgaaaaacctcggcgtggaaacgcacgtcattgaatttgcgccaatgctgatggcagaacagctcgatcagatgggcggcgagcagctacgtcgcaagatcgaaagcatgggcgtgcgtgtacacaccagtaaaaacacgcaagagattgttcagcagggtaacgaagcgcgtaagactatgcgttttgccgacggcagcgagctggaagtcgatttcatcgtcttctctaccggtattcgcccccgcgacaagctggctacccagtgcggtctggccgtcgcgcagcgcggcgggatcgtgattaacgacacctgccagacgtccgacccggatatctacgctatcggcgagtgcgccagttggaacaaccgcgtttacggtctggtcgcaccaggctataaaatggcccaggtcgccgttgaccacatcctcggcagtgaaaacgcctttgaaggggcggatctcagcgccaagctgaagctgctgggcgtggacgtcggcggcatcggcgacgcgcatggccgcacgccgggcgcgcgtagttacgtttacctcgatgaaagcaaagaagtctacaaacgtctaattgtcagcgaagataacaaaacgctgctcggcgcagtactggtcggcgacaccagcgattacggcaatttgctgcaactggtactgaacgccatcgaactgccggaaaacccggattcgctgatcctgccgtcgcacgcgggcagtggtaaacccgctatcggcgtggataaactgccggacagcgcgcagatctgctcctgcttcgatgtgactaaaggcgatctgatcgccgctatcaataaaggctgccataccgtggcggcgctgaaagcggaaaccaaagccggaaccggctgcggcggctgcatcccgctggtgacgcaggtactgaacgccgaactggcgaaacagggtattgaagtcaacaacaacctgtgcgagcactttgcttattctcgtcaggaactgttccacttaatccgcgtggaaggtatcaaaacctttgaagaactgctggcgaaacacggtaaaggctacggctgcgaagtgtgtaagccgaccgtcggttcgctgctggcgtcgtgctggaacgaatacatcctcaagccgcagcacacgccgctacaggatactaacgataacttcctagcgaatatccagaaagacggtacttactcggtgatcccgcgctcggcgggcggcgaaatcaccccggaaggtctggtggccgtgggtcgtatcgcccgcgagtttaacctctataccaaaatcaccggttctcagcgtatcggcctgtttggcgcgcaaaaagacgatctgccggaaatctggcgtcagttgattgaagccggtttcgaaaccggtcacgcgtatgccaaagcgctgcggatggcgaaaacctgcgtcggcagcacctggtgccgctacggcgtgggcgacagcgtcggtttcggcgtggagctggaaaaccgctacaaaggcattcgtaccccgcacaaaatgaaattcggcgtctccggctgtacccgtgaatgtgcggaagcgcagggcaaagatgtgggtatcatcgccacggagaaaggctggaacctgtacgtctgcggtaacggcgggatgaaaccgcgtcatgcggatctgctggcagccgatctcgatcgcgacacgctgatcaagtacctcgaccgctttatgatgttctacatccgtactgccgacaaactgacccgtaccgcgccgtggctggataatctggaaggcggcatcgagtacctgaaatcggtcatcatcgacgataagctgggcctgaacgaacatctggaagaagagatggcgcgcctgcgcgcagcggtggtctgcgagtggacagaaaccgttaacaccccatccgcacaggttcgctttaagcactttatcaacagcgacaaacgcgacccgaacgtccaggttgtgcctgaacgtgaacagcatcgtccggccacgccgtatgaacgtatcccggtcactctggtggaggaaaacgcatgagtcagtggcaaaacatctgcaaaatcgatgacatcctgccgggaaccggcgtctgcgcgctgtcaggcggcgagcaggtggcaattttccgtccttaccatagcgatcaggtgtttgcgatcagcaacatcgacccgttctttgaggccagtgtgctgtctcgtgggctgattgcggaacaccagggcgaactgtgggtcgccagcccgttgaaaaagcagcgcttccgcctgagcgatggtttatgcatggaagatgagcagttttctgtgaaacattacgacgcgcgggtaaaagacggcgtggtgcagttgcgcggttaattatttttgggaggcgcaacgcctccccttttttgtattttttttcattttaattgttatcacaaaatcatttgtactgcatcgcggcggcaactgagcaacaaattcgtcaggaacgaatttgaacagccgctggctgccttcggtgagggacaaggatgtccctcattaatccccaggagcatagttcactatgtgactggggtgagcgagggcagccaacaaagaggcagtgcaaaggatgaagtgagaaaaggataatcaaatgtttacagacactatcaataagtgtgcggctaacgctgcgcgcatcgcacgcctgtcggcgaataatccgctcggcttctgggtcagttcggcaatggccggggcttatgtcggtctcggcatcattcttattttcaccctcggcaatctgctcgacccgtccgtacgtcctctggtgatgggagccaccttcggtatcgccttaacgctggtcatcatcgccggttccgaactgtttaccggccacaccatgttcctgacgctgggcgtcaaagcaggcaccatcagccacggtcaaatgtgggctatcctgccgcaaacctggctcggcaacctggtcggttccgtgtttgtcgccctgctttacagctggggcggcggcagtttattgccggtcgataccagcatcgttcactcagtcgcgctggcgaaaaccaccgcgcccgccacggtactgttcttcaaaggcgcgctgtgtaactggctggtttgtctggcaatctggatggcaatccgcaccgaaggcacggcaaaatttcttgctatctggtggtgtctgctggcgtttatcgcttccggctacgagcactccgtcgcgaatatgacgctgttcgccctctcctggtttggtcatcacagcgacgcctataccctggccggaattggtcataacctgttgtgggtgacactcggtaatactttgtccggtgtcgtattcatgggattgggttattggtatgctacgccaaaatcggagcgtccggctccggcaaaaatcaatcagccagaggctgctgccaataattaaggggtaatgtcgtggaccatttgcctatattttgtcaattacgcgaccgcgactgtctgatcgtcggcggtggcgatgtcgcagaacgcaaagcacggttactgctggaagcaggcgcacgtttaacggtcaatgcgctaacctttattccacagttcaccgtatgggcaaatgaaggcatgttgactctggttgagggaccgttcgacgaaacgcttctcgactcgtgttggctggcgatcgcggccactgacgacgataccgtcaaccagcgcgtcagcgacgcggcggagtcacgccgtatcttttgcaacgtggtggatgcgccgaaagccgccagctttatcatgccctccattattgaccgctcgccgctgatggtcgccgtctcctcgggcggcacctccccggtgctggcgcgtctgctgcgcgagaaactggaatcgctgctgccgcagcatctggggcaggtcgcgcgctatgccgggcaactccgcgcccgagtgaaaaagcagtttgccacgatgggcgagcgtcgtcgcttctgggaaaaatttttcgtcaatgaccggctggcgcagtcgctggcgaatgccgatgagaaagcggttaacgcgacaaccgaacgcctgtttagcgaaccgctggatcaccgtggcgaagtcgtgctggtcggcgccgggccgggcgatgccggactgctgacgctgaaagggttacaacaaatccaacaggcggatatcgtggtttacgatcgcctcgtctccgacgacattatgaacctggtacgccgcgatgccgatcgggtctttgtggggaaacgcgcgggttaccactgcgtcccacaggaggaaatcaaccagatcctgctgcgtgaagcgcaaaaaggtaaacgcgtggtacgcctgaaaggcggcgatccctttatctttggtcgcggcggcgaagagctggaaacgctgtgtcatgccggtattcctttctcggtagtgccggggattaccgcggcttccggctgctccgcctactccggtattccgctaactcatcgcgattacgcccagagcgtacgtctggtcacgggtcacctgaaaaccggcggcgagctggactgggaaaacctggcggcagaaaaacagacgctggtgttctacatggggctgaatcaggcagcgactatccaggaaaaactgatcgcattcggtatgcaggccgatatgccggttgcgctggtagaaaacggtacctccgtgaagcaacgcgtcgtccacggtgtgctgacgcagctcggtgaattagcgcaacaggttgaaagcccggcgctgattatcgttggtcgcgtggtagccttacgcgataaattaaattggttctctaatcattaattaaaataacgccctgttattcagggctttattttacaactactcgtaatctcaaattatttttacttaaaagtgaattaagaaactaactttaaatacaccggacaaatttaaataataattctgcctaaaaacccttttactcgtcaaattcacctcttattcattcatacaataaataacaccgttaagcactcaatttgacctgacctggttatcgggtgataaaataaacactaaagcataatttttcttctggccatttcatcattgcctgtaccgctctctgcatatgtttagtacgcaaggaaaatattaattaaggatgaaccctatgcaaaagaaaaaacttatttctatcgctatcgctttaacgctacaaagttattacattccggccatcgccgcagaaaataacgatgatgaaaaagaatgtcccagtaatatctcctccctgcctaaagaaaaacgcgcaaaactctcaccgacctgccttgctacacctgaaaatgataatcactggggctgggttgctggcggcgttgctgcattggtcgcaggtgtggctattggcgttgaaaataacggtggcggagattctaatcattcttataccccccctaagcccgataatggcggcgacgtcaccccgcccgacgatggcggcaacgtcaccccgcccgacgatggcggcaacgtcaccccgcccgacgatggcggcgatgacaatgtgaccccgcccgacgatagtggcgatgacgatgtggccccgcctgacgatagcggcgatgacgatgtaaccccgcccgacgatagcggcgatgatgatgtgaccccgcccgacgatagcggcgatggcgatgtgaccccgcccgacgatagcggcgatgacgatgtaaccccgcccgacgatagcggcgatgacgatgtgaccccgcctgacgatagcggcgatgacgatgtaaccccgcccgacgatagcggcgatgacgatgtgaccccgcccgatgatagcggcgatgacgatgtaaccccgcccgatgatagcggcgatgacgacgacacgcccccagatgactctgttattaccttcagcaacggcgtcaccatcgataaaggcaaagacaccctgaccttcgacagcttcaaactggataacggcagcgttcttgagggtgccgtgtggaattattcagaacaggacaaccagtggcagctcaccaccgcggacggtaaaacgctgaacgtcaccggctgggacgtgaccgacgccaatgccgccgtgattgaaggcacccaggaaaacggtctctactggaagtacgacagccggggctatctgattattgccgacgataacaccaccgttatcagcggcgatgaccaggcgcataattccgatcgcggcatggatatcagcggccaggatcgcaccggcgtgattatttccggcgatagaaccgtcaacacgctcaccggggactccagtgtgaccgacggtgccaccggcatggttatctccggtgacggcaccaccaacaccatttcgggccactccacggtggacaacgccaccggcgcgctgatttccggcaacggcaccaccaccaatttcgccggtgacattgccgtgagcggcggcggcaccgccatcatcatcgacggcgacaacgccacgattaagaataccggtacctctgacatcagcggcgcaggctccaccggcaccgtcattgacggcaataacgcccgcgtcaacaatgacggtgatatgaccatcaccgacggcggcaccggcggccacattaccggcgacaacgtggttatcgataacgccgggagcactaccgtcagcggcgcagacgccacggcgctgtatatcgaaggcgacaacgcgctcgttatcaacgaaggtaatcaaactatctctggcggcgccgtcggtacgcgcattgacggcgacgacgcccataccaccaataccggtgatatcgcggtggatggcgcgggctctgccgccgtgattatcaacggcgacaacggcagcctgacccaggcgggcgatctgctggtcaccgacggcgcgatgggcatcatcacctatggcaccggaaatgaagcaaaaaataccggcaacgccaccgtacgtgatgcggactcggtgggttttgtggttgcaggcgaaaaaaacaccttcaaaaacaaaggggatattgacgtcagccttaacggcaccggcgcgctggtgagcggcgatatgtcgcaggttacgctggatggcgatattaacgttgtctcagtccaggacagcgaaggcgtgtttagctcagcgacaggggtgagcgtgagcggcgacagcaacgccgttgatatcaccggcaacgtaaatatcagcgccgactacgggcaggatgatctggctgccggggctcccccgttaaccggcgttgtcgtcggcggtaacggcaataccgttacccttaatggcgcgctgaatattgatgacaacgatctgtccgccaccggcggacaatacctggacgttgttggcctgagcgtaacaggtgatgataacgacgttgagattgacggcggtattaatatcacccacagcgaggatccacttgatggaacctctgcagacattaccggcatcagcgtcagcggtaacagtaccgttacgctaaacggtcattctaccattgataccaacacggtagtgggggggcacgttgtactggcgcgggtcaacaacggcggctccctgattctgggtgatgactcagttgttgacgttaatgtcagttatatacccacaggctattacacctacaacgcgttgctgatggctgatggcgaaggcacatcaattgaaaataaaggcgatattacaagccatggcgtgtattccgtcattcgcgcagataacggctcggaagtcagcaacagcggagatattctggtctacgcgaccagtagcaacagtagtgaggatcgtgcagccatcacaagggctagtggcgagggatcggctgttcataacaaagccggcggcgatatcaccctcatttctgatcagacgccgcagggcagtggcggtattgaagtatacccattgaaatggtacacccacaccttttacgccatgatggcttcggattatggcgatgtcgttaacgatgagggcgccacgatccatttgcagggggcaggtgtatatggcgttaccgccagccgaggtaaagcactaaacgaaggcaatatctatctggatggccttgtcccgacgctggacgatgaaaataacatcaccagcaccagctactggcagccatcatcgctctatctcaccagctcaggaatggtggcgggttccaccgatgccgatggcgacgccaccgccatcaacaccggcaacattaccgtcaacaacgccgggttcggcatgatggcgcttaatggcggcaccgccattaaccagggcgtgatcaccctgaccgccgatgacggcgtgaccggtcaggcagacgagctggtcgggatggcggcgctcaacggcggcgtcgtcatcaacgacaccagcggcgtgattaacatcgacgccgattacggccaggcgtttctgagcgacagttccagctacatcatcaataacggctctatcaaccttaacggcagcccgatggatgatactgattcacacatgggcggcacgccaacggacaaaatctggattcagtctctgcccggcagcggcgacagcgacaccaggacctccgacacaggtttcttcaccgccggtacgctggccaactacggtactgaaaccctgaacggcgatgtggacgttaacgggggctggctgtacaacgaagcgggcgcctcgctcaccgtcaacggcaccgtgacgattaacggcggggctaacgcgctggctaactacgggacgctggacgcggacgctatttccacctggcacagcctctttaatgaagcggacggcagcatcaccaccgatctgttaacccttaatggcgacgtcactttttacaataacggcgatttcaccggctccatagcgggcaccagctaccagcaggaaatcgtcaatactggcgatatgacggtggcggaagatggcaaatcgctggtcagcggcagcttctatttctataacgaagaggacgctacgcttaccaacagcggcagcgcggtggaaggcggcgagaacaccatcatcaatctgacgcgcgccaacgattcgctgacccaggtgaacagcggcaccatcaccgccactaacggttacagcgccatcaccacggtcaacggcagcaatgaccccaaatggatctggaacaccgcaaccggcgtgattaacggtattaacccggatgcgccgctaatcaatttgggccgcggctataacttcggcaaccagggcactatcaacgtgcagggcgataacgccgtggcgattagcggcggcaccagcagttatgtcattaacctggtcaatagcggcaccatcaacgtcggtaccgagcagggcaaggaggacggcaccaacggcaccgggcttatcggcatcaagggcaacggtaatgccaccaccataaacaacaccgcagacggcgtgatcaacgtttacgcggatgactcgtatgcgtttggcggcaagaccaaagccatcatcaacaacggcgaaatcaacctgctgtgcgacagcggctgcgacatctacgcgccgggtactacgggcacgcagaacgaccataacgggacagcggacatcgtcatcccggatgcgactaccgccccgaccgagggcagcatcccgacgccgccagcggatcccaacgcgccgcagcagctctccaactatattgttggcaccaacgccgacggtagctccggtacgctgaaagccaataacctggtgattggcgacaacgtgaaggtggataccggctttaccagcggtacggcggataccaccgtggtggtggataacgccttcaccggcagcaatatccagggcgcggacaacatcacttccaccagcgtggtgtggaacgcccagggtagccaggatgccgacggcaacgttgacgtcaccatgaccaaaaacgcctatgccgatgtggcgaccgacagctcggtaagcgacgtggcgcaggcgctggacgccggttacaccaacaacgagctgtacaccagccttaatgtggggactaccgccgagctgaacagcgcactcaagcaggtgagcggtgctcaagccaccacggtattccgtgaagcgcgtgtactcagcaaccgctttaccatgctggccgacgccgcgccgcaaattaaagatggtctggcgttcaacgtggtggcgaaaggcgacccacgtgcggagctgggcaacgacacccagtacgacatgctggcattacgccagacgttggatctcaccgccagccagaatctgacgctggagtacggtattgcgcgtctggatggcgacggttcgaaaactgcgggcgataacggcctgacaggcggctacagccagttctttggcctgaagcacagcatggcgtttgatgaaggtctggcgtggaacaacagcctacgctatgacgtgcataacctcgacagcagccgttctgttgcctatggcgatgtcaacaaaattgccgattccgacatgcgtcagcagtaccttgagtttcgcagtgaaggggcgaaaactttcaccatgatgggcgatgcgctgaaagtcacgccgtatgccggggtgaaattccgtcacaccatggaagatggctacaaagagcgcagcgccggagattttaacctgtcgatgaactctggcaacgaaacggcggtagactctattgtcggcctgaagctggattacgccgggaaagacggctggagcgccaccgctaccctggaaggtggcccgaacctgagctacagcaagagccagcgtacagcgtcattacagggtgcggcgggtcaatcgttcggcgtggatgacggtcaaaaaggcggcggcgttaatggtctggcaaccatcggcgtgaaatacagcagcaatgataccgcgctacatctggatgcctaccagtggaaggaagacggtatcagcgataaaggctttatgcttaacgttaagaaaacatttcgttaaataaacgacattatataacactaataaatatcctccggcatagccggaggtttttcagatgcgcctataaggctctcttaccagccgcgccctaacaggcgcatacgatctgacatttgcatcaaacttcgttacttacggcccgtaaacgggctgcccggatacgggatcgataattgctcacccattttatcctcttcaagctggtgctttatgtagtcctgtatcttcgccgtgttcttacccaccgtatcgacatagtaccctctgcaccagaactccctgttcctgtatttgaattttagatccccaaactgctcgtaaagcatcagactacttttacccttcagatatcccatgaaactcgacacactcatcttcggcgggatctccagaagcatgtgaatatgatctgcacaacattctgcttccagaattcgtacgtttttccattcacacaattttcttaatatgctgcctactgccctacgcttctctccatagaacgcttgtcttcggtatttgggcgcgaaaactatgtgatatttacagttccatcgggtgtgcgctaagctcttttcgtcccccattgggacccccttttgatttcttgttgaacttttgcagttgccagaccgcaagatgttttaacaaatcaaaaggggttttaataactggcttaaagctgaaagctttccggaacccccagcctagctgggggttttccatagacaataaaggccgcttattattaagcggcctttttaaatcatatcccctggtaaagataaagtccttatttggactacctggatgattcattaattgctatcgtactatacgctaaatagatcttatatttattccaccagtagtgctcgttttatcaacaaggattttgaaatgtttaaatttgtaaaaattgccgttgtggcaggggttctggcgacgctcactgcttgtactggtcatatcgaaaacaaaaaaaataactgcagctacgattatttgctgcaccctgcaatttctatttctaaaattattggcggttgcggcccggctgccgatcaataatagaaacgactgcgcagatacaaaaaaaccgggattttcccggtttttttacaggtctgataaacggtacggcacaggtgccttgtccaacttacgctcgttggtaggcccgataagctagcgccatcgggcacgcaataacccttacggtttcgccacaaagccaatggcttcgtaaacggctttcagcgtttcggccgcacgtgcgctggctttttccgccccgtctttcatcaccttctgcaagaacgcttcgtcgttgcggaaacggtgatagcgctcctgcaactcagacaacattccggaaaccgcctccgccacttcgcctttcaaatggccatacattttaccttcaaactgtttttccagttcaggaatgctctgaccggtcacggcggaaagaatatccagcaggttagagacacccgctttctctttcacatcataacgcaccaccggcggctcgtcggagtcagtgaccgcacgtttgattttcttcactaccgatttcggatcttccagcaagccgatcacgttattacggttatcgtccgatttggacattttctttgtcggctccagcagcgacatcacgcgcgcgccggatttgggaataaacggttccggtactttgaaaatatcgccatacagcccgttaaaacgctgggcgatatcgcggctcagttccagatgctgcttctgatcttcgcctaccggcaccagattggtttggtacaacagaatgtctgccgccatcagcaccgggtaatcaaacaggccggcgttaatgttttccgcatagcgcgcagatttatctttaaactgcgtcatacggctcagctcgccgaaataggtatagcagttcagcgcccagccaagctgcgcatgttccggcacatgggactgaacgaaaatagtgctcttttcaggatcaataccacatgccaggtacagcgccagcgtatccagcgtcgctttacgtagctgctgcgcgtcctgacgcacggtaatagcatgttggtctacgatgcagtagatgcaatgatagtcatcctgcatgtttacccactgacgcaatgcccccatatagttgccaatggtcaattcacctgagggctgtgcgccactaaaaacgatgggcttagtcattttttatttcctggttatcgctatgcggaagcccaagtgcgggcaaaagatcgttaaaactgtcataaatgacgtccggctcgctaagagcgatcgcttcgccataattgtagccgtatgtcaggccaaccgaagggcagcccgccgcttttgcagcctgaatatcattacgcgaatcgccgacaaaaagcatctgctccggcatcatgcccagccggcttgccaccagcaacagcggctccggatgcggcttcttattttgcacatcatcgccgccgataaccacactaaagtatttggcgatatcaagcgattccagcaacggcgcgacgaacggcgtcggcttattcgtcaccagacctaatgacaatccgctggcgtgcagcgcgcccagcgtgtcggcgacatggggaaataaaacggtgccctcttccgccacttcgccataatacctgtcgaacagcttacgcagaatacgtacctgttcctcggcaggaatatcttcatcaacgggcggtttacccatcgtcttacgcagcgtggcgcgctcctcgcgagcccaggtcagcgcgcgttccatcaatacgtctgcgccgttaccaatccaggtaatcacgcgctcctcgcccgcgaccggcagttccagcgcatacagcgccatatccaccgccgcggcaagacccggcgcgctatccaccagcgtgccgtcaagatcaaaggcgacgccccgaatattctgcaacttatccatgagttacctttgccagctcactgcgcatttcatcaatcacttttttatagtcgggtttatcgaaaattgccgaccccgcaacaaacatgtccgcacctgctgcggcgatctcgccgatattgttcaccttcacgccgccgtccacttccaggcgaatgtcgtaaccggacgcatcaatgcggcgacgcacttcgcgcagtttatccagcgtctgcggaataaaagactggccgccgaagcctgggttcacggacatcagcaggatcacatccagtttgtccatgacgtaatcgagataactgagcggcgttgccgggttgaataccagccccgctttacagccgtgttctttaatcagctgtagcgtgcggtcaacatgttcggaggcttccgggtgaaaggtaatgatgctcgcgccagcggcggcaaagtcgggcacgatacggtcgactggcttgaccatcaggtggacatcaataggcgcggtaataccgtactgacgcagggatttcagcaccatcgggccgatagtcaggttcggcacatagtgattatccatgacgtcaaagtgtacaacatcagcaccggcagccagcgctttggcggtgtcttcacccaggcgagcaaaatcagccgacagaattgagggggcaatcaaatactgtttcatccgcttctccttgagaattattttcttgcaggcgttgcgactcctggttggtacagagccagcagttcgtccacctttttacgtgtgccgccgttgctgcttatactgcgtctaactttgacgacatgcaattttgcgagttgataccactcgcgtgtgagcgccgtatcatggttggaaatgagcaccggtatccggttactgaccagattctcagcgatttccgccagatgcgcttgttgcgtcaggctaaaactattggtgtgatacgctgtgaagttagccgtggcggacaacggcgcataaggcggatcgcaatagaccaccgacgacttgtccgcacgcgccatactgtctgcgtatgactcacagtaaaagaacgcattctgcgctttttctgcaaagtggtacaactccgcttccgggaagtaaggtcttttataacgaccaaacggtacattaaattccccgcgtaagttatagcgacagagtccgttataaccgtagcggttcagatataaaaacagtaccgcccgacgaaaggggtcctggcaggtgttgaactcctcgcggagttggtaatagacctcagcctggttagtttcaggcataaacagctcgcgcgaagcctgtacatactcgtcagtacgtaacttcacgatgttatagaggctaataaggtcgctgttgatatcggcgaggatataacgagaaaagtcggtgttaagaaacaccgatccggcacccacaaaaggttcgacaaggcactcgccttttggcaaatgtcgtttgatatcatcaagcagagggtattttccccctgcccacttcaaaaaagcgcgattttttttcatgctgactaactaattacaccttctccggctgtggagaaagctccgacagcatcctgcgctttaggctgtgccgcgttgctttacggcgcatttgacggtagcaaatgcgcccctcgcgcctgtcctgaacaaaaatagctgtcagcgacactcacaggcaattgcaggacacagcctggattatttcagatcggcctgaacctgatgcaacggttttgcccacgggtttttcgcctgcacatcggcaggtaaggtggacaccgcacgtttagcatcttctttcgaagcatacatccccgttaccagcacataccacggttgtccattacgcgtcgtctcgtataccacataatttttcaggttctctttcttcgcccaaccgttcaggttgtcgtaatttgaagaactactgagctgcaatgtgtagtggctggatggcgcgctctttaatgcgccaacgttgccggcgcttttcccgccgcctgcgacaggcgtcgtcgaggcttgcgctggcttcgcggtttgtaccggcgcagcgcttgccgtcgctgtcggcgcagccgtcgtggtggtcgctttcggcgtcgcggctggcgctgccggttccgtgcgtttcactggcgcgaccggtttcttcggttccgcagtggtggttttcgccgtggtctgcggtttcttaggttcaatgacggcctgtttacgttccggacgcgtggtatgacgctcggcaggttcgctaaccgccgcctgacgcgtcgtgctgccattgcgaactggcgcgacggttgcaggctctgtcggcaacgtagagttcaccgcaacattgttcatctgctctggattctgcgtcagcgcattattcagatcgccctgcacttccacgcgctgctgaccgtcagcgaccacaggcgactgtccctgcgtcggcgttgaagaaatcggcggcaacgaaatatcctgcgacgtattgcccgcggtttgttctgcggaggtggcgcccggcgcaggctgggtcgcattcgcctgatcggcggcgttaccggaaagatcgatactcttttcgccagaggccgacggctcgctggaagacgttgagggggctttcagcgcggagccgataccgataatcaacagcagcagcaccagcacgccaacgcccatcatcatgtattgacgagaggctggcttatgggccgcttttttacgcttacgtggacggcgttcaacacgctcttcgtccaccgtatcgtcttcatcggattcgtactcttcttcaacttcaggttcttcactacgcgctttacgcgtacgcgtcggacggcgatcgtcggcgtccagatcaacgtcatcaaagttgatctgcggttcactatcgcgttctgaagattgacgagaacgaccagtacgacgatcgctgggatcgggtttcagctcgtcttctggtttgaattcatccatttaacaccccactcaaaggttaatgcttacgacattgcacataacctgaagctaaaaaactgacatctacgcaatatcagtttgacctttcttgttgtcacgcctgctgacagtcagcaatcgcgctaagaacgacttcgtgcgacactccgccgcgcacttcacttttccctatggccagcggaagcactaaacgcagctcccccgctaacacttttttatctcgcagcatgtgcggcaaatagtcctgcgcggacatctcgcaagggccattgactggcaacccggcccgttcgagtagagcgatgatgcgctgcgtatcagcagaactgaactgccctaaacgctcggatgcgcgtgcagccatcactatacctgcggcaacggcttcaccatgtaaccaattgccatatcccatttccgcttcaatggcgtggccaaaggtatgtccaagattcagtaaagcacgtaagcccgcttcacgctcgtcggcggcaacaacttcggctttcagctcgcaacaacgacgaatacagtacgccatcgccgggccgtccagacgcaatagcgcatccagattaccttcaagccaggtgaagaagtccgcgtcgagtataatgccgtatttgatcacctctgccagtcccgatgtcagttcgcgtgcgggaagcgttttcaggcaatcaagatcgacaaccacagaagcgggttggtaaaacgcgccaatcatgtttttgccaaggggatggttgacggcggtcttcccgcccacggaagaatcaacctgcgacagtaaggtagttggcacctggatgaaacgaacgcctcgctggtagctggccgccgcaaaaccggtgagatcgccaatcacgccgccgccaagcgcgaccagcgtggtatcacgaccatgcggttttttcagtaacgccgtaaacaccgtatccagcaccgtcaggctcttatactgctcgccgtcaggaagaatcacgctgtctacgttaacgcccgcccgttcgagtacgccgcgaaccttgtccagataaagcggcgccagggtttcgttggtcactaacatgacctgatcgcctgatttcagcggcaagaatgaagctggttcgttaaacaaaccagccgcgatggtgatcgggtaactacgttccccgagagtgactgtaatcctctccatgacgcgacatccaccttagttacttgtgcccgcttacccagcgtattctgcttgaattagttgctttccagcatatgaataatctggtttgccacaaccttagcgctttgatcgtcggtgcgaatggtgacgtcggcaatctcttcgtacagcggattgcgttcgttagccagcgcttccagaacttcgcgaggcggtgcttcaacctgcaacagcgggcgttttttatcacgctgcgtgcgcgccagttgtttttcgatggtcgtttcaaggtagaccacgacgccacgcgcggagagacggttacgcgtttcacgcgattttacagagccaccgccggttgccagcacaataccctgtttttccgtcaattcgttgataactttttcttcacgattacggaagccgtcttcaccttcaacatcgaagacccagcccacatcagctccggttcgtttctcaatctcttgatcagaatcgtaaaattccatattgagttgttgagctaactggcgcccaatagtgctttttccggcacccataggcccaaccagaaagatattgcgtttctctgccattttttcggtactactaagactattcgttaatggtaaacccgcttcacagacacccagcgcagcaggacatgaactgaaacctcataagatattgcgagagtcagactgaaaattatctcaatactcaagcgggtttggcaactgaataaatcaccaagcctgattgttgcaaaacccgagttagcgttgccgaatggcgaccagaacaacatatccggcctacaaattgctctactttcaaacaattgtgcgcaatccgcagaaccaatacgtctgcatcagcggacattcagccgtttatcatcggtcttatgcacaccttcggcaaggcaaagcgcattaatcaatgcgtaagcaacgaaaagcacgactctcaaatcggtactccttgtatgctaaatacatccgcacgtcaaatcccgcagatgcgttcagtgcaaaaacagcgcttttttatgcataaattattctgtcgccaccagtctgggggtgataaacaccactaattcgcgtcgctcgtcctctttaccgtcatggcggaagagctgaccaagccagggaatatcccccaacagcggcacgctatcgctacccgatttattttttcgcgaaaaaataccgcccagcgccagcgtctcgccgctttttacctctacctgcgtttcaatttcctgtttatctatcgccagcacttcgccgtcagcctgttgtagtacctgaccgggaacattctggctgatatgtaacttcaggcggatgcgccctttttgcaaaacggtgggcgtcacctccattcccagtaccgcttctttaaattccacggaggtcgcgccgctttcgccgctggaaacctgataaggaatttcgctgccttgcttgatactggctggctgtagatgcgaagccagcagccgggggctggcgataatatccaacagctgcttttgttccagcgctgacagctccagatccagcaagcgtccgttaatgcgcccgatgttaaacccgacgcgtgaggtggcggcggcgacagataaatcactggaaagcgtcgtcacgtcacccaccgagcccgcttgcgtcgcgtcagccagcgtccactttacgcccagttcccgtagactcttttcgttaatggtaacgatatgcgccgccagctccacctgcgccaccggcagatccatttgcgatacccatttttccagctccgccaaggccgcgcggttatcgcgcaacagcaggcggttggtgcgcttatctaccatgatggttcccttcgcgctcaggagtttctcgcccgctttcgccagttcgccggcatcggcgtattgcaggctaatgctgcggttttccagcggtaaattagcctgaaaccttaaccgctcggcatcctgccgcgcactgtgttctttctgccaggcctgtgaatgaacatggagaatattcccctcctgacgtagcaccagccccgcgctattgaccaccgtctgtagcgcctgtttccacggcacatccgtcagatgtagcgataatgtcccgctgacgtccggcgacaccaccagattctgccgctcctgctcggctaaagtctgcaaaacctgcaccacagggacgtcatcaaccaccagcgtcactttcgccgcttttcccgcctgcgcggcgggcatcaaggctatcagtattatggctatccatcgcttcattgtccgctccctgacgtagccaccgccactgcggcggcgcacaatttttaccggtcgttaacgttaaggtttccgccgtcaggcggacaatcgtccaaccgttttccagcgtctgcccttcttccactcgtcgccatttttgctgactgtctttaagaatgcctgtccatcgctcgcctttacgcaccgcgccctgataccgccactgcgagagttccgctatccggcagcgatcttccggcgggcggaagggatcgcgcattcctgtcaacatcagcaaacaaaaacagagcaatacactgcggctagccttcattcgccaggcgctccagttgcagcgtcatcaataattccgccccctctttacgcaatgaaaaccgacttacgctcatctcgctttcggccaaccggacaaacagcgacggcaccgcatcccaggacgttttcagcgccatttctcccccctgcgccgatggctgccagtgcagcaaacgcaggggaggcgcctggaaatctaacggcgaaaaaggacgcggattttccactgtgcgcccgaaaagcggttcagccgcgacgctcagacggcgcagatgacgccactgttgccgggcggcctcgcgctgctggcttaaccgcgtttgttgcgtatccaacgttttccagccgggatagcccacagataacgcaaccgtcagcgtcaggcacagcacgcctgcacaccaataaaaaacccgaccacggcgcgacatcccgtaccagatatcaaagagcgcgttcacgggcggcgctcctcgttaactgataatggaactgccagcgcccttgcgcatcctgccgcgtggcgcccgtgcggtttagcggaaaactgacatagtgacgaagtgatgtctcaagcgtgagcagggcgtcaaacgttctcgccagcccttccagctctagcgtctcttgctgataattgaggcttgtcagccatgcctgctctggcaacaggttggcaaggtcagtcaagatagattgccaggcttgcgtcagttcacgctgcgcctgacgttgtaatcgcgcctgttgctgccgctgacgctgctgcaactgcggtatgttcgccgcaagcgccgtcgtgcgtccgttttccgtcgtcagtagcagctcgttaatcctcccctcctgccaaaaaaccaaccgggcgatcgtcgcgaggcttgctatcagcagcagggacgcgccccataccacgcaccacagccgcagacgcgctacgtaatgttggcgccgccaggggagcaaattgacagaatgcgccatcagcgtatctcccccatggctaaacccagcgcaatcgcaaagcgataaccgtccggcggaaccggcggttggcggacggtaacggcgtgccaggggtcgaattcgccttcggcgcataacgaaatatgttccggcacgacggataacgtcgcggcaaggtcatgcagcgtcatcgcctctcgcgccgatttacgtccccacgcatagcgcgtcgcccacagccactggctctcatcgcgccagaccagacattgccgccccgaaggtataaacggcagcaagcgctgtaacgcgcaggcatcgggcgttacagcagcgatgcgcacattgagcgtttgcgccagcgttaacagctctgaaatttctttgctttgcacggcggtaacgttgaacgcagggcttagcgcatcgtcctgaaagtcgaaacgcaataagtccggatccatatccagctcacgcgccatcgtttgtgaaagccatgcgacttgctcacgttcccgcagacgcatcggcggatgtggaaaagcgcgttgcaatgtccgatttgcgggaaaagagagataaatacggtgacgtagcggcagctcgcggctccagggtcgcagtacgtgagccagcgattgcgggtcaggaatcgtaccctctgccgtggaggcgttcatcagcggcagtcgccaccaacgttgcagagaccagcccgatgcgccgtgaataacggcgatggccagcgcttcatgctgctgaatatgcaatcctatttgccaggttttaaaagccataacggtcgatctccttatcacccgtcgcgttaacgggtatatcaatgcgtctggcttgcctttatactaccgcgcgtttgtttataaactgcccaaatgacactaaatgggaaatctccagtgaagttcgtaaagtatttattgatccttgcagtatgttgcatcctgctgggagcaggctcgatttatggcctttatcgctatattgagccacagctacctgacgtcgcgacattgaaagatgtgcgtttgcaaattccgatgcaggtttacagcgcggatggcgaacttatcgcgcaatatggcgaaaaacgtcgtattcccgttacgctcgatcaaattccgccggaaatgatcaacgcctttatcgccaccgaagatagccgcttttatgagcatcacggcattgacccggtaggtattttccgtgcggccagcgtcgcgctcttctccggtcacgcatcgcagggagcaagtaccattacccagcaactggcgcgaaacttcttccttagccccgaacgcacgctgatgcgcaagatcaaggaagcgtttctggcgattcgtattgagcagttgctgaataaaaatgagatcctcgaactctatctgaacaagatctatctcggctaccgcgcctatggcgttggcgcggcggcacaggtctactttggtaagacggtcgaccagcttagtctaagcgaaatggcggttatcgccgggctaccgaaagcgccttctacctttaacccgctctactcgatggatcgggcgatagcgcgccgtaacgtagtgctttcgcgaatgttaagcgagggatatatcactcaggcgcagtacgatcaggcccgtagcgaacctatcgacgcaaattatcacgcgccggaaatcgccttctccgcgccttatctgtcggaaatggtgcgccaggaaatgtataaccgttatggcgaaagcgcttacgaagatggttatcgtatttacacgaccatcacccgcaaagtgcagcaggccgcgcaacaggcggtgcgtaataacgtgctggactatgacatgcgccacggttatcgcggcccggcgaatgtgctatggaaagtgggcgaaacagcgtgggacagtaaaaaaattaccgatacgttgaaagcgttgccgacctacggaccgctgcttcccgccgtggtcaccagcgctaatccgcaagaggcgaccgctgcgcttgccgacggtacgtccgtttcgctacatatggaaggaatgcgttgggcgcggccttaccgctcggatacgcagcaggggccgacgccgcgtaaagttaccgatgtcgtccagacaggtcagcaaatctgggttcgtcaggtggataacgactggtggctggcgcaggtaccggaagtgaactccgcgctggtttcgcttaacccgcaaacaggcgcggtactggcgctggtcggcggtttcgattttaatcagagtaaatttaaccgcgcgacgcaagctttgcgtcaggtggggtcgaacatcaaaccgttcctctacaccgccgcaatggataaagggctgacgctcgccagtatgctcaacgatgtgccgatttcccgctgggacgccggggcaggttcagactggcgtccgaaaaactccccgccgcagtacgccggaccgattcgtttacgccaggggctggggcagtcgaaaaacgtggtgatggtacgcgccatgcgcgccatgggcgtcgactatgcggcggagtatttgcaacgcttcggcttcccggcgcagaatatcgtgcataccgaatcgctggcgctgggctccgcctccttcacgccgatgcaggttgcgcgcggttatgcggtgatggcgaacggcggtttcctgatcgacccgtatttcatcagcaagattgagaacgatcagggcggcgtgatcttcgaagcgaaaccgaaaatcgcctgcccggagtgcgatatcccggtcatttacggcaatacgcagaaatctgacgtgctggaaaacaccaatgtggaagaggtcgcggtttcgcaagagcagcaaaacagcgccgtaccgatgcctgagctggaacaggcaaaccaggcgctggtcgcgcaaaacggcacgcaggaatacgcgccgcatgtgatcaatacgccgctggcgtttctgatcaaaagcgcgctgaacaccaatatctttggcgaacccggctggatgggtaccggctggcgtgcggcgcgcgaccttaaacgtcgcgatatcggcggcaaaaccggtacgaccaacagctcgaaagacgcatggttctccggctatggtcctggcgtcgtcacttccgtatggatcggctttgacgatcaccgccgtgatttaggccgcaccaccgcttccggcgcgatcaaagatcaaatctccggctatgagggcggcgcgaagagcgcgcaacctgcatgggacgcctatatgaaagccgtgctggaaggcgtgccggaacagccgctaacgccgccgccgggcatcgtcacggtgaatatcgaccgcagtaccggacaactggcgagcggcggtaacagccgtgaagagtatttcatcgaaggcacgcagccgacacaacaggcggtacacgaggtgggaaccaccattattgataatggtgaaacacacgaactgttctgatcaaaaaaggcgctccggcgccttttttattgtgtttagcggatgacggcgaacggggagacaaactttccgttggcttgatcaacgccgcgccatcaggcaattcggccctgcgctttcaaccactcgcgtaccagaaacagcgcgctgacgttgcgggcctcgttaaaatcggggtcttccagcagatccattaaatgcgccagcggccagcgtacctgcggcaatggctcaggctcgtcgccttccagcgactccggatagagatcttccgccaccacgatattcattttgctggaaaaataagagggcgccatgctgagtttttttaagaaggtcaggttatgcgcgccaaacccgacctcttctttgagctcccggttcgccgcttcaaaaacggtctcgcccgggtcgatcaatcctttcgagaagcccagctcataggattcggttcccaccgcatactcacgaataagaatcagatgctcatcaacgatcggcacaatcattaccgcctcacgggttgatggtcgcatacgttcatacacgcgacgcacgccgttgctgaactccagatccacgctttctacgttaaacagtcgggattgtgcgacggtttccactttcagaatggtgggtttttgtaatgatttgctcattgtgagaatctttgcagtgtaatctgtggtcattgtgcgacataccgcacggtttcggcaatgcgaattgccgtttatttacatttatgtaacgtaataaaaattaattcttatttcaaattaaaagtcaataggttgaaataactccaggaatttgctgatattccgtttttggtggtattgctatgatttgccttcactgggatgcgctttacaatgctcaagttcaactccacgcttgccgatagccaaccacagaaaaatgtttattggacagggtgcgactgaccacgcctgacagacttagtaagatggggaaagcatgagcaccattctgatttttatagctgctttgctggcctgctctctactggcaatatggcggttccgggtaaagtccagacgagggagcttaccgtggatcagcgcctttcaggacgcgcaaacgcgtaaactgttgcccgaagagcgcagcgcggtagaaaactatctcgataaccttagccagatccagcaagttccggggccgacaggcgccagtgctgcgcccatctcgctgacgctgaacgcggaaagcaacagtgtcgtgatactaacccactccatcacccgctacggcattaccactgacgatcctaataaatggcgctactacctcgactccgtcgaagtccatctgccgcctttctgggaacagtacatcaatgatgaaaacaacgttgagctgatcctcacggatacgctgccgctggtgatctctttaaacggccatacgctgcaagagtatatgcaagagtcgcgcggctacgcgctacagaataccgcctctacgcaggcgtcgattcgcggcgaagagagcgagcagattgagctgttgaatatccgtcaggagacccacgaagaatatgcgctcagccgcccggctggcttgcgcgaagcgttgttaatcgtcgcctcctttttgttattctttttctgcctgataacgccagacgtttttgtaccgtggatgataggcggcgcgatcctgctgctggcagccggactttgggggctttttgcgccgccgtcgaaaagcgcgctgcgggaaattcactgtctgcggggaacgccccgccgctggggactgtttggggagaataatcaggagcagattaacaatatttcgctgggcatcatcgaccttatttaccctgcccactggcaaccctacattacgcaggatcttgggcaacaaacggatattgatatttaccttgatcgccatgtcgcgcgccagggccggtttttatccctgcatgatgaagtgaaaaacttcccgttgcagcactggttacgcagcactgttattgctatcggttcgctgctggtgttgtttatgctgctgttctggatcccgctggatatgccaatcaagttcacgctatcgtggatgaaaggcgcgcaaaccattgaagcgacaacggtaaaacagcttgaaaaagctggcgtgcgggtgggcgatacgctgcacctgagcggtaaaggaatgtgtaatattcattccggcgcgacctggagcggccagtctaactcaccgtttatgccgttcgattgctcgcaaatcatctggaatgacgcgcctgcgctaccgctgccggaatcagacctggtgaataaagcgatggcgctaagccaggcggtaaatcgtcagctccatccaaaacccgaagacgactcgcgcgtaagcgcatctttacgctccgcgatccaaaaatcgggcatggtattattagatgactttggcgatattgttctgaaaaccgctgatttgtgcgcggcggaagacgagtgcgtgcgtctgaaaaatgcgctggttaatctcggtaacagtaaggactggaacgcgctggtgaaacgcgcgaacgccggcaaactggacggcgtcaacgtgctgctacgccccgtaagcgcagagtcgctggaaaatctggtcacgacctcaacggcgccgtttatttctcgcgagaccgcgcgtgccgcccagtcgctgaatagccccgctcccggcggattcctgatcgccagcgatgaaggcagcgaactggttgatcagacctggccgtcaacgccgctgtatgactatcccgcgcaggaacagtggagcgccttccagcgtctggcgcaaacgctcatgcagacgccatttagcgccgagggcattgtcaccagcgtgtataccgatgccaacggcacgcagcatatcagcctgcatcgtatccccgataaatccggctggtggcgttacctcggcaccacgctgctgatgctggcaatgatagtgagcgcggtctacaacggcattcaggcgttcaggcgttatcaacgccaccgtacccgtatggcggacatccaggaatactatgaaagctgcctcaatcccaggttaaccgtctctccggaaaatctcatctgatagcgccgccgtgcgacagggtatgctaccctgtcgcgcaaattgcgttaccctggagttccccatgcatattgatattgactggcaaaacgtggataccgttttgctggatatggacggcacgctgctcgatctcgcgttcgataactatttctggcaaaagctggtaccggaaacctacggcgcgcagcagggtatttcgccgcaggacgcgcaggaatatattcgccagcagtatcatgccgtacagcatacgctaaactggtactgtctggattactggagcgagcgtctgggtctggatatttgcgccatgacgacggcgcaagggccgcgcgccgttttgcgcgacgataccgtaccgtttctgaatgcgttaaaagccagcggaaaacgtcggattctgctcaccaatgcgcatccacataacctggcggtgaagctggagcataccggtctggcctcacaccttgatttattactttccacccacacatttggttatcccaaagaggatcagcggttatggcgcgctgtcactgaggaaacgggaataagcgcagagaaaacgctgtttatcgatgacagcgaaccgattctcgacgccgccgcccggtttggtattcgctactgtcttggcgtgacgaatcctgattccggcctggcggaaaagcactatacgcgccatccgtccctgaacgactaccgccgtctgatcccctcgctgatgtgaaggagacgccatgaaagaaaagtcctccgttgaggtcagactggataaatggctgtgggccgcgcgtttttataaaacccgcgcgatggcccgcgagatgattgaaggcggtaaggtgcattacaacggccagcgcagtaagccgagcaaaatcgtcgagctgaacgcaacccttaccctgcgtcagggaaatgacgaacggacggtgatcgttaaagccatcaccgaacagcgccgtccggccagcgaagccgtcgctctgtatgaagagacggcggaaagcgtggaaaaacgcgaaaaaatggcgcaggcgcgcaagcttaacgccctgaccatgccgcatccggacaggcgaccggacaagaaagagcgccgcgacctgttacgatttaaacacggcgacagcgaataactgtcacccgcaagagagatgattatgccgcaacatgaccaattacatcgttatctgtttgaaaactttgccgttcgcggcgagctggtaaccgtttcggaaaccttgcaacagatcctcgacaatcataactatccgcagccggtgaaaaccgtactggccgaactgctggtcgccactagcctactgaccgcgacgctgaagtttgctggtgacattacggtacagctccagggcgacgggccgttaagcctggcggtgatcaatggcaataatcagcagcagatgcgcggcgtagctcgcgttcagggcgatatccctgacaatgcggatctcaaaacgctggttggcaacggctatctggtgatcaccattacgccggaagagggtgaacgctatcagggcgtggtgggtctggaaggcgatactctggcggcgtgcctggaagattacttcctgcgctccgagcagttgccgacgcgcctgtttatccgtaccggcgatgtcgacggtaaaccggcggcaggtggaatgttgcttcaggtgatgccggcacagaacgcgcaggcggaggatttcgaccatctggctatgttgacggaaaccattaaaagcgaagagctgctgacgttaccggcaaatgacgtgctgtggcgtttgtatcacgaagaagaagtcacgctctacgatccgcaaaatgttgaattcaaatgcacctgttcacgcgaacgttgcgcgggcgcgctgaaaacattgccggatgaagaagtggacagcattctggcggaagaaggcgaaatcgatatgcactgcgattactgcggcaatcattacctgttcaatgcgatggatatcgcggagatccgtaacaacgcctctcctgccgatccacaggttcattaatcgcctttcagtcgacaacatcattgcctgatggcgctcgcttatctggcctacagcatcccgctccgtaggccggataaggcatttatgccgccatccggcaaaaagcttactcgttgtagtaatccacatccaaccgctgaccatcaacaatgatatcgcgccaggctttgggggctgagtctaaccgatgcccggcaatcgcgtgcaacagttgcgtcttagaaaacccgtccggcagtcgggcgaacgctttctgcgtccatttcccctcttttaagccgtagacctggctctcggcaacaataaagttatacagcacctgctcaggctgaccgtcgccgttaagatcctgactcaccagcacgcaggcatccggttcaaggcaggaatcgtccgaataactctgctctttgacaaacgcccaaaatgcggcatccggcttctggctaccgggcgcaatcatcaccacccgcgctaaatcgtccgccgtcggagagaccttatttctctgcaaaaacgtcatcagttcacgattgcgctttctgttctgcgtaaacgcctcgtcatcccgcaacgatttcagcgcttcctggccaggtttgccgctgtgatccagcatatacaggctgatctgatccgcagtaattttaccactatggtaacgcgccatatggctgttgacgctaatacgccagacatcaagtacaggcgaggccagcaacagcaatatcaccagcgtcaacaaagagacgctcagtatcaccttgccttgccactcaccagggtcgcgtccgcggcgtaacagaccgatcagataaccgaaggaccataccagcaagacagacaccgtcagcgcaccatacagacgatccggcgtccaaccgtattgctgaatgcgtacccataacgcccagcccgccagcagcatatatatcggggcaacgcacagcgaggcgctaatcatgccgcgtagtacgcgcggatagggtaatacgcgcttttgcggttcgttgacaatcgccacgaggagcagcagcatcagcgtcagcgtggatagcagccccgcagcggaaacacgcgcagaaatcgcctccagtccggtaaagggtaacgtcacaataaacagcaatgccagcagcgacaccactggcagtaaacccgtcgcgatcagcgtcagcagcttttgcaccgccgccacaaggcgcgactgcgtgcgggcgagaatgaccgccagcgccgtaatcaggccgatggtcacataaataaaggcttcagtttcaaagaaaagggtgctgaaaaagcggatgcccaccagcctgaatagcgcgctccagagcagaagcaccagccagaacagtccgttagcgaccaggacgataaacaatgtcagtacgttatgccataaccgcagataaaactggggataacgcgccgaaccggtttgcgaatgtaactgatattgcatccagggtaagaccagcatcgccatcaacacaagccggagaccatacagccagaggagctcggccaggcgccatttctccaccgtctcaacctgccatttcagccagccgctcattgccagcacgaccacaaagatcagccccagccagccccacagcgcgcgctgtttaaaagagaccacggtaagcaatagcattgacgacaacgctatcgtcgcaggcataccatagaacagccagtcgctattttgtggtaccagccaggccatcagcaggtagcacaagacgccctgcagcaaaccggtgagcaacatcccccagcgagtagtatgtgaaagcgctacactttccatgtcgttatccagaatgatgagaaagccgcattattgcaccatctgttcaccgccaggcgtcgtcatgcataattcagaaaaaaacgcagagaggtgaatcgatattgttaatgttggtgttacgtaactttcttacatgaatgcgattacagtcacattatgtcggtcaaaaacacttccttttaacgttttcagaacattttccacaacaaaagtaggtttcctgccataataaccgccgctgcgtgacaggagtcacagtgtttttcgtcaatcgtgattttgtccagatacgtaaatctatgagccttgtcgcggttaaccaacctcaaaaaaccttactattttcggtaatatatattggctaaggagcagtgatatgcgcgttaacaatttaaccccgcaagatctcaaggcttatggtatcaacgacgtccaggatatcgtttacaatcccagctacgacaccctttatcaggaagaacttaatcctggtctggaaggctatgagcgtggcgtgttaactaacctgggcgctgttgccgttgataccggtatttttaccggtcgttcgcctaaggataagtatattgttcgcgacgacaccacgcgtgatacgctgtggtggtccgataagggtaaaggtaaaaacgataataagccgctttcccaggaaacctggcaacacctgaaaggtctggtgacgcatcagctttctggtaaacgcttattcattgttgatgcgttctgcggcgcaaatgccgatacgcgtctttccgtgcgctttattacggaagtcgcctggcaggcccacttcgttaaaaatatgttcattcgcccaacggacgaagagctggtaggcttcaaacctgactttattgtcatgaacggcgcgaagtgcaccaacccgcagtggaaagagcaagggctgaactcggaaaacttcgtggcgttcaacctgactgaacgtattcagcttattggcggcacctggtacggcggcgaaatgaaaaaagggatgttctcggtaatgaactacctgctgccgctcaaaggtatcgcctcaatgcactgttccgccaacgtgggtgaaaaaggcgatgtcgcggtcttcttcggcctttccggtaccggaaaaaccactctctccaccgacccgaaacgtcgtctgattggcgatgatgagcacggttgggatgacgacggcgtgttcaattttgaaggcggctgctacgccaaaaccatcaaactgtcgaaagaagcggagccagaaatttatcatgcgattcgccgtgatgcgctgctggaaaacgtcaccgtgcgcgaagacggcaccgttgatttcgacgatggttccaaaaccgaaaacacccgcgtctcttacccgatctatcatatcgataacatcgttaagcccgtgtccaaagcaggtcacgccaccaaggttatcttcctgacggcggacgccttcggcgtgttgccgccggtttcccgtttaaccgctaaccagacgcagtaccacttcctgtcaggtttcaccgctaaactggccggcaccgaacgcggcgtcaccgaaccgacccccaccttctccgcctgcttcggcgccgcgttcctgacgctgcacccaacgcagtatgctgaggtgctggtgaaacgtatgcaggcagcaggcgcgcaggcttatctggttaacaccggctggaatggcaccggcaaacgtatctccatcaaagatacgcgcgcaattatcgacgccattctgaacggttctcttgataacgcggaaaccttccgtctgccgctgttcgatctggcgatcccgactgaactgccaggcgtggatacccacattctcgacccgcgtaacacctacgcgtcgccggaacaatggcaggaaaaagccaccgcgctggcgaaactgttcattgagaacttcgagaagtatacggataccccggcaggcgaagcgctggttagcgccggaccgaagctgtaaggaacaggccggatggcggctttgaacggcgtcatccggcgttgagaagaaagggagggtaatacctccctttcttatgcctcttttgtcgtcccctggacgcgagccacaggaaccggtagccaggcgcgaatcgacaatccgccacgctcgctggtgccaatctccagcatcccgttatggttatcgataatgcgctgcacaatcgccagccccagccctgtgccgctggtgctacgggcgctgtcgccacgcacaaaaggctggaacagatgtttacgctgctccggcttaatgcccggcccgtcatcttctacctgaaaccaggcgcgatgcgactcggtgccgctgctgaccttaatccagccgttgccatagcgggcagcattgaccaccatattcgccaccgcgcgcttaatcgagagcgggtgcattttcacctggatgctgcctgcctgaagcgcagtgttaatctcacgctcatagccgctttccgccgcaatcacctcgcccagcacggaattgagatccgccatctccattggcatttcctgaccggtacgcagatagtcaataaactgttcgataatggcgttacactcttcgatgtctttattgatcgactccgcgagataaccgtcttcctcgcccatcatctccgtcgccagacgaatacgggtcaacggcgtgcgcaagtcgtggctgacgcccgccatcaatagcgtacggtcatcggccaattgcttcacgccggctgccatatggttaaacgcccgggtcacagagcgcacttcagaggcgccatattcacgcagcggcggcggaataattcccttccctacctgcaaggcggcatgttcaagatccactaacggtcgattctgtatacgaataaacagccacgcgccgcctatcgccaggagcatgatcgccagcgtgtaacggaaaagcggagaaaaatcgccctgatgaatctcggtcagcggcacgcgcacccagatattgggcgacagccaggttttgagccacacgacgggcgagcttttgttgacctcaacgcgcacttccgtcgggccgcctaattgctgcgccatctggtggcttaagaattcgtagtgttgcgcccaacgcaacccggcctcttcggcggcttcgttggtgtagagagagatccccagctcgcgatagatttcccggcgaaacgcaggcggcacgactaactgcgtgccgtcctccagttgcagcttatcggtcatcagcatacggacttcgtaagccagaaccttattaaactgctggaggctcggcaaaatcgcgaagttcagcaccaccaggtaggtcgtcaccaggctgacgaacagcaaggtgacgatgagcaacagcgtgcgggcaaatgaacttcgcggtgagaagcgcattcgcctcatgctttagaaccgtccggtacaaagacgtagcccaggccccagacggtctgaatataacgcggatgtgccggatcttcttccaccatacggcgcaggcgggagatctggacgtcgatggagcgttccatcgcggaatactcgcggccacgggccagattcatcagcttatcgcgagagagcggctcgcgcggatggctgactaacgctttcagtaccgcaaactccccgctggtcagcggcatcggttcatcttcacggaacatctcgcgcgtaccgaggttcagtttaaacttaccgaacgcgataacggcctcttcctgcgacggcgcgccgggcagttcgtttgcctgacgacgtaacacggcgcgaatacgcgccaacagctcgcgcgggttaaacggtttaggaatgtagtcatcggcgccgatttccagcccgacgatacggtcaacctcttcacccttcgccgtgaccataatgatcggcattggattactttgactacgcaggcgacgacaaatcgacagaccatcttcacctggcagcattaaatccagtaccatgagatggaaagattcacgggtcagcagacgatccatctgctcagcgttagcgacgcttcgaacctggaagccctgctcggtcagataacgttccagtagcgcccgcagacgcatatcgtcatcaaccaccagaatcttataattctcttgcattgtctgtactcccaaaggttcgcaacaaatgtaagtgtgtattcttaaaaaagctcacgtgagtcaccagcaaattctggtatgaatttcaggctaaattgttacaaagcatatttaacagcagcttaaatatacaattaatcggcaaccccattatttattctgtcgggacgatcacgttataccccgtgtgcgcaatatcgacagcaaaggtaaatcaacgagatgaaaacgcccctgatcacccgcgaagggtacgaaacactcaaacaagagctcaattatctctggcgtgaagagcgcccggaggtcaccaaaaaagtgacctgggctgcgagtctgggcgaccgcagcgagaatgccgactatcagtataataaaaagcgcctgcgtgagatcgacagacgcgtcagatatctgaccaaatgcatggaaaatctcaaaatcgtggattattccccgcagcaggagggcaaagtcttcttcggcgcctgggtggaaattgaaaatgatgacggcgataggctgaagttccgcattgtcggctacgatgaaattttcggacgtaaggattacatctctatcgactcgccgatggcgcgggcgctactgaaaaaagaagtgggcgatctggcggtggtcaacacccctgtcggcgaagcaaactggtacgtcaatgcgatcgaatacgtcaaataagacaagaagaatcctaagcccccgctgatggctggcatttttgccagccaatccgtataactatcccctgatttttatcctgaagacgaagctaacccatgatgaatgattctttctgccgcattattgcgggtgaaatccaggcaaatgccggacaggttgaagctgccgttcgcctgcttgacgaagggaacaccgtgccgtttatcgcacgttatcgtaaagaaatcaccggcggtctggatgacacgcagttgcgtaacctggaaacgcgtctgggctatctgcgtgagctggaagacaggcgtcaggccatcctcaagtccatttccgaacaaggcaaactgaccgatgagctggctggcgccatcaacgctacgttaagtaagaccgagctcgaagacctctacctgccctataaacctaaacgccgcacccgtggacaaatcgccattgaagccggccttgagccgctggccgatctgctctggaacgagccgtcccacgatcctgacgtggaagcggcaaagtacattgatggcgacaaaggcgtggcggacacgaaagccgcgctcgacggcgcacgctacattctgatggagcgctttgccgaagacgccgcattgctggcgaaagtacgtgattacctgtggaagaacgcccatctggtcgccaccgtcgtgagcggcaaagaggaagaaggggcaaaattccgcgactatttcgaccatcatgagcccattgctaacgtcccgtctcaccgtgcgctggccatgttccgtggtcgtaacgaaggcattctgcaactttcgctcaatgccgacccacagtttgatgagccgccgaaagagagctactgcgagcaaatcatcatggaccatctcggcctgcggctaaataacgccccggcggatagctggcgcaaaggcgtagtgagctggacgtggcgtatcaaagtcttaatgcacctcgaaaccgaactgatgggcaccgtgcgcgaacgtgcggaagacgaagcgattaacgtgtttgcgcgtaacctgcacgacctgctgatggcagcccccgcaggcctgcgcgccacgatgggccttgatcctggcctgcgtaccggcgtaaaagtcgctgtcgttgacggcaccggcaagctggtggcgacggataccatttatccgcataccggtcaggcggccaaagcggctaccgtgatcgccgcgctgtgcgaaaaataccacgtcgaactggtcgcgattggcaacggtacggcctcgcgtgaaaccgaacgcttctatctcgacgtacaaaaacagttcccgaacgtgacggcgcagaaagtgatcgtcagcgaagcgggggcgtccgtgtattccgcttctgagctggcggcgcaggagtttccggatctcgacgtctccctgcgcggcgcggtctctatcgcgcgtcgtctacaggatccgctggcggaactggtgaaaatcgatccgaaatccatcggcgtcggccaatatcaacacgatgtcagccagacccagttggcccgtaaactggatgcggtggtcgaagactgcgtaaacgccgtcggcgtcgatttgaataccgcctccgtgccgctgctgacccgcgtcgcgggcttaacgcgcatgatggcgcaaaacatcgtcgcctggcgcgatgagaacggtcagttccagaaccgccagcaactgttgaaggtgagccgtctggggccgaaagcgtttgagcagtgcgcgggcttcctgcgtattaaccacggcgataacccgctggatgcgtccaccgtccacccggaagcctatccggttgtcgaacgcattctggcggcgacgcagcaagcgctaaaagatctgatgggcaacagcaacgaattgcgccacctcaaggccgctgattttaccgacgataaattcggcgtgccgaccgtgagcgatatcatcaaagagctggaaaaaccgggccgcgacccgcgtcctgaatttaaaaccgcgcaattcgccgatggcgttgaaaccatgaacgacctgctaccggggatgattctggaaggggcggtcactaacgtcaccaatttcggcgcgtttgtcgatatcggcgttcatcaggatggcctggtccacatctcttccctgtcgactaagttcgtcgacgatccacacaccgtggtaaaagctggcgacatcgtgaaggtgaaagtgctggaagtggatctgcaacgtaagcgtattgcgctgacgatgcgtctggacgaacagcccggcgaaaccgccgctcgccgcggcggcggcgccgatcgcgctcagggcaaccgcccggcatcaaaagcggcgaaaccgcgcggtcgtgacgcccagccagccggtaacagcgccatgatggacgcgctggcagccgcaatgggaaaaaaacgctaatcgggtaatacgcaggccgggttacttcttatccggcctgcgattttgcaatacgtccaaccctttcttttttaattaacaattaaatcttacccattagaatctgttaattaatttccttctgctatccgcactattaattatcactttattaacagatgaaaccttaattaaacattaaaaacggtgaatatttgcacattagaggtatttgcaaaaagacaaataaatgttgagccatatcaacatcggcgcaaattatcgcttatttgtacattccgtcacattttaatcgttgaagatagaaaccattctcattatcattgtgttgttgattatttactctttccttcgttggctaaacatcgggtctcctgccgcccccctgagcgccgcatgaggtatacatccagttagtaagaaacaagtaggtcgtatgcaattcactcctgacactgcgtggaaaatcaccggctttgcgcgtgaaatcagcccggcgtatcgtcaaaaactgctttcgctcggcatgttgcccggctcttcatttaatgtcgtccgcgtcgcgcccttaggcgatccgatccatatcgaaacacgacgcgtgagtctggttttgcgtaaaaaggatttggcgttaatagaagtggaagcggtttcctgttaatacagtgagtctataaaaatgaaaaaattaaccattggtttaattggtaatcctaattccggcaagaccaccttatttaaccaactcaccggcgcgcgtcagcgcgtggggaactgggcgggcgtcaccgtcgagcgtaaagagggccagttcgcgacaactgaccaccaggtcacgctggtagatttacccggcacctattctctgacgaccatctcgtcacaaacctctctcgacgaacagatcgcctgccactacatcctgagcggcgacgccgacctgttgataaacgttgtggacgcctccaatctggagcgcaacctctatttgacgctgcaactgctggagctgggtattccctgtattgtcgcgctcaacatgctggatatcgccgaaaaacagcaggttcgtattgatgtcgacgctctgtccacgcgtctgggttgccctgtcgtaccgctggtatcgactcgcggtcgcggtatcgaggcgctgaaactggccattgatcgtcacaacgctaacgacaacgtcgaactggtgcattatgctcagccgctgctgcgcgaagcggatttcctggccgacgcgatggcccaggagatgcctttacaacagcgccgctggctgggtctgcaaatgctggagggcgatatctacagccgggcttacgcaggcgaggcggcgcaaaacctggatacctccctggcccgtctgaaggacgaaatggacgacccggcgctgcatatcgccgacgcccgttaccagtgtatcgccgctatttgcgacgtggtcagcaataccctgacagccgaacccagccgcttcaccagggcggtcgataaaattatcctgaaccgcttcctcggcttaccgatttttttgttcgtgatgtacctgatgttcctgctcgccattaacatcggcggcgcgttgcaacccctgtttgatgccggttccgtcgccatctttattcatggcattcaatggattggctacacgctgcacttcccggattggttaaccatcttcctggcgcaaggtcttggcggcgggatcaataccgtcctgccgctggtgccgcaaatcgggatgatgtacctgttcctctccttccttgaagactccggttatatggcgcgcgcggccttcgtcatggatcgcctgatgcaggcgctgggactaccgggtaaatccttcgtgccgctgattgtcggcttcggctgtaatgtaccttccgtgatgggcgcccgcacgcttgacgctccgcgcgaacgcctgatgaccatcatgatggcgccgtttatgtcctgtggcgcgcgcctggcgattttcgccgtctttgccgccgccttcttcgggcaaaacggcgcgctggcggtcttctcgctgtacgtgctgggtattgtcatggcggtattaaccggcctgatgctgaagcataccattatgcgcggcgaagcttctccgtttgtgatggagctgccggtttaccacgtcccgcatatcaagagcctgatcatccagacctggcaacgcctgaaaggttttgtactacgcgccggtaaagtcattatcatcgtgagtattttcctgagcgcgtttaacagtttctcgctgagcggcaaaatcgtcgataacattaatgactccgccctcgcctctgtaagccgggtcatcacgccagtctttaaaccgatcggcgtccatgaggataactggcaagcgaccgtgggtctgtttacgggcgccatggcgaaagaagttgtcgtcggtacgctgaacacgctctacaccgccgaaaatattcaggacgaagcgtttaatcctgccgactttcacctcggcgatgaactgctgggcgcggttgacgatacctggcaaagcctgaaagacacctttagcctgagcgtactggctaatccgatcgaagcaagtaaaggcgacggcgaaatggcgaccggcgcgatgggcgtgatggatcaaaaattcggcagcgccgcggcggcgtacagttacctgattttcgtcctgctttacgtaccgtgtatctcggtaatgggcgctatcgcccgcgagtccagccgcggctggatgggcttctccatcctgtgggggctgaatatcgcctattcgctcgccacgctgttctaccaggttaccagcttcagtcaacacccgacatacagcctgatctgtattctggcagtgatcgtctttaacgttgtggtgttaagcctgttacgccgcgcccgcagccgtgtagacattgaactgctggcaacccgcaaaaacgtcagttcctgttgttcgggcactgcgggcaattgtcactaagggatgtaaaaaatggcttcattgatacaggttcgcgatctactggcgctgcgggggcgtatggaggcaacgcaaatcagccatacgctgcacgctccgcagcccatgatcgacgccatgctgaatcaactggagatcatgggtaaagcggtacgtatcccggaagaaccggacggctgcctttcaggcagctgtaaaagttgtccggaaggtaaagcctgcctgcgcgaatggtgggccttgcgttaaccttcgtcgggtagcgacgtaacgcgtcttatccggcctttatcccgcgttatgttgcccggtacgcgtcacgctgccgggcaattttgcgtcatgccttccacaaagatgaaagcgttaccgccgtgcgcatttatctccccacgcgcctcgcaagcgcactaatcctctactgcaatcagcccggtctgcgcgtagtgtcacgccattgaacttcaccgatgacggatcgatatggcgacctcaacaacatccacgccgcatgacgcggtattcaaacagtttttatgccaccccgatactgcacgggattttttggaaatccatctcccgtcgacattacgtcaaatctgtaatctgaatacgttacggctggagtccggtagctttattgaagaggatttacgcccccattattccgatattctttggtcgctggaaacaagtgaaggtgaaggttacatttacgtggttattgaacatcagagtacgccggacgcgcatatggcatttcggctgatgcgttacgcaatggctgcaatgcaacggcacctggaggccgggcataagacgttgccgttagtggtgccaatgctgttttatcacggaaaccgcagcccgtatccgttctcattatgctggctggatgaatttgccgacccggtgatggcgcgtaagctatacgccaccgcctttcctctggtcgatattacggtcgtgccggacgacgagattatgcgacaccgacgggtcgcgctgctggaactcatacaaaaacacatccgccagcgtgatctgatggggcttgtcgaacagctggtcgccctgctggttaagggatacgctaatgacacccagcttcaaagtttgtttaattacatgatgcacactggcgacgccgcgcgcttcaatacgtttatccgccaggtggctatgcgtatcccacagcataaggagaagatcatgactatcgcagacagattacgtcaggaaggacatcgtaacgggttacagcaaggcaagcaggaaggccaacggctcgccgcattgcgcattgcccgctccatgctaaacgatggtttcgatcgcgataccgtgcttagggttaccgggctggcgcctgccgatctggcgtctgaaaaccattaatctggcagaatggtccgggcccggcaacgccctggttacagcgatgattttagcgtcatcagcgcctgacaaaacgccgccggatgcgagataaacggcgcatgggccgccttcgccattatctgtgatgtactgtgcggccataacgtatcgagcaaaggcacgattttacgcggcaccagaccgtccagataaccatacaaacgcaaaaacggcatgttcacatttttaagcgcttctcgtagatcgaccgtttttaagatttccagtccgccattgagcacctctacatccggcataggctgcgccagcaccacgctttttaaggtgcgggcatcctgacgcgccgtctccgtccctaacgtttgcagcgccagaaaacgctccaccgtgcgctgaaaatcgtcgctaagctgctgctggaatccgccgaggatttctggttttattcccggccacccctcacgcgcgctaaagcatggcgaagaggcgacagtcaccagcgcctggacgcgttcagggtgggtgagcgccatctgactcgccaccaggccacccaggctccagccaagccagatagcctggtccggcgcgtttttcgctacctgcgccgtcatctcttcaagcgtcatggcgccaaaccccgagctgcgaccatagcccggcaagtcgaccagatgcagcgtaaaatgcgagccgagttcctcgcgaatgcaatgccatacctccgcgttcaatccccatccgtgcagcagcacaagatgacaatttccctcgccgtaggtctgccaccagatgtcattcatcagttactgttctcttttgtctaacaaggatgcacctatgctaacagtaccgggattatgctggctatgccgaatgccgttggcgttaagccactgggggatttgttccgtatgcgcgcgcgctgttcgtcagcgcgtcagcctgtgtccgcaatgcggattacctgccgcgcatccttcgctcccctgcggtcgctgcctgcaaaaacctccgccctggcagcgtctggtgagcgtcagtgactatacaccgcccttgagtttactggtgcatcagcttaaatttacccgccgcagcgaaattgccgccgcactggcgcgtctactgttgcaggaagtcctcatggcgcgccgcagcactggcttgcagcttcccgacagaatcgtcagcgttccgctctggtcgcgccgacactggcggcggggatttaaccaaagcgatctgttatgccaaccgttagcgcactggctgggctgcgcgtgggacagccagaccatcacgcgggtacgggcgaccgcaacacaacatcatctcagcgccaggttacgtaagcgcaatttgaaaaacgcgtttcgccttgaattgccggtacagggtctccatatggttattgtggatgatgtcgtcactaccggaagtaccgtcgcggaaatcgcgcaactgcttttgcgcaacggcgcagcgactgtccaggtatggtgcctgtgtcgaaccttgtagagcctcgatgatgggcgtattataaccaactaaaatagtcaactattaggccattactatgatccgtatttccgatgctgcacaagcgcactttgccaaactgctggcaaatcaggaagaagggacgcaaatccgcgtatttgtcattaatcccggcactcctaacgcagagtgcggcgtttcttattgtccgcccgacgccgtagaagccaccgatactgcactgaaatttgacctgttgaccgcttatgtcgacgagctgagcgcgccctatctggaagacgcggaaattgatttcgtgaccgaccagctaggttctcaactcacattgaaagcgccaaacgcgaagatgcgcaaagtggccgatgacgcgccgctgatggagcgcgtggaatatgctctgcaatcgcagattaacccgcagttggcgggccacggcggtcgcgtctcgctgatggaaattaccgatgaaggctatgcaattctgcagtttggcggcggttgtaacggttgctcgatggttgacgtcacgctgaaagaagggatcgagaaacagttgctgaatgaattcccggaactgaaaggggttcgcgatctgaccgaacaccagcgcggcgagcactcatactactaagattttccccgcatccatgcccgatggcgcttgcgcctgtcgggccttgtcagccccaccgtaggccgaataaggcgtctacgccgccatccggcgctatcaaccacatctcataacaatggcccttcttctttcgccgataacatgacctgtgtctcataatttaaattttgcctgccagggtcattttcaacacccatatgttacccgtatcattcttatgggcacctaacatccatataacatctgactacgctcattcgtttcaacggtaatcagtattggtgctattgcgactctgttcccgtcgggaacaacaggaatttgtcgtcgaaacaatgacgttacccataacaaagtaaaggccaggtaaatcatgccattagtcatcgttgctatcggtgttatcttgttacttcttctgatgatccgcttcaaaatgaacggatttatcgcccttgtcctggtagcgctcgctgtcgggttgatgcagggaatgcctctggataaagtcatcggctccatcaaagccggtgtcggtggtacgcttggcagtctggccctgattatggggttcggcgccatgctgggcaaaatgcttgccgactgcggcggcgctcaacgtatcgccactaccctgatcgcgaaatttggtaaaaagcatattcagtgggccgtagtgttaaccggctttaccgtcggcttcgctctgttctatgaagtgggcttcgttctgatgctgccgctggtattcaccattgccgcagcggcgaatatcccgctactgtacgtcggcgtgccgatggccgcggcgctctccgtcacacacggcttcctgccgccgcacccgggtccaaccgcaatcgccacgattttccatgccgatatgggtaagacgctgctgtttggtacgattctggcgatcccgaccgtgatccttgccggaccggtttacgcccgtttcctgaaaggcatcgataagccgatcccagaaggcctgtacagcgcgaaaacttttacggaagaagagatgccgggctttggcgtcagcgtctggacgtcgctggttccggttattctgatggcgatgcgtgcgattgccgagatgattctgccaaaaggccacgctttcctgcccgttgccgagttcctgggcgacccggtaatggctacgttaattgccgtactgattgcgatgttcacctttggcctgaaccgcgggcgttccatggatcagattaacgatacgctggtctcttccatcaaaattatcgccatgatgctgctgatcatcggcggcggcggcgcattcaagcaggtgctggtcgatagcggcgtggataaatacatcgcttcaatgatgcatgaaaccaatgtctctccgctgttgatggcgtggtctatcgcggcggttctgcgtatcgcgctgggctctgcgactgtcgcggcgattaccgcaggcggcattgcggcgccgctgatcgccactaccggcgttagccctgaactgatggttatcgcggtcggttccgggagcgtgattttctctcacgtcaacgacccgggcttctggctgttcaaagagtatttcaatttgactatcggcgagaccattaaatcctggtcgatgctggaaacgatcatctccgtctgcggcctgatcggctgtctgctgttgggtatggtggtttaagcgaggcggcttgtaggccggataaggcagcaatgtgcgccaggattgcctgatggcgctgcgcttatcaggcctacgtgctctcaacataataaagccggggaaatccccggctttattatttcttcttcgcggccgcttttcggcgtttatccaaatccttaatcagcttgtttacgccctcatcggcaaacatctgctccagcgtggcagtgagcttccgtcgccagtttttatactgatcgctggtgcccggtacgttaaccggatcggccatatccagccagtcctccggctgaagccccaacagaccgctgttactgtcggctatgtagcgctgaagcccgcgatttagcgttggcgtcatcgacattaacgatgccttatgcccggcgcgttttggcagacaaccatatttatgcagcgcgtccaatagcccctgtttcgcccgctcgcgatcctcatacagcccgcgcagaatcacttcatccggataaagccccaaagctttacccaacgtcaggtcaccgcattcccaatagccgcgcagcgtggggagatcgtgcgtcgaggcgacagccatcgattgttgcggatatgcgcccggcgcgcggaagtttttctcaaggtcattttcaaaccacagcactttataagaatagaccccgctatcgcgcagcttgccgacaatctcaactggcaccgtccccagatcttcgcctatcaccatacagcggtgacgttggctctccagcgccagaatagaaagcaaatcatctaccggataatggacgtaagccccctgatccgctgtttcgccatacggtatccaccacaggcgcagcaacgacatgacatggtcaatgcgcaacgcgccgcagttttgcatattggcgcgcagcaggtcgataaagggctcatacgcccgggcgacaatgatatgcgggtccatcggcggcagcccccagttctgaccgagcgggccgaggatatccggcggcgcgccgacagatgctttcaggcagtacagctcccggtcgcaccaggtttccgcgccgccttccgctacgccaaccgccagatcgcggtacagaccaatcggtagtttaaaactctggcaggtatcccagcaggcggcgaattggcgccaggccagccactgaagccagaggtaaaactccacctcttcgcggtgcgcttcacagaattgttttaccgcgggatactctaccgactggtacgcctccggccaggctggccagccccagcgctgctcatcctcttttacctgatacgcatgcagcgcgtcgaatgccgcctgccagtaaaggctctcgccttcgcgggcgataaagtgacgaaactccgccatttgcgcatcgtcgcgagcggcaaaccgcgtccacgccatccgcagcgccgtgattttcagcgcggtaacggtagcgtaatccacccattgcgcatcgcgcgcctgtcgcagcttttgctgtgtggcgggcatttgccaccatgcctgcgcctcttcgctcaggcggaaatcttcgacggcgttgacgtcgatatatatcacgttcagccagcgacgagacgaggggctgtagggactggcgctctccggattcgccggataaagcgcgtggatcggattcaggccgataaacgcgccgccgcgtgtcgccacgtcgaccagcatcgacttcaaatcgccgaaatcgccaataccccagtttttttctgaacgcagagtataaagctggacgcaggccccccacagttttttcccttccagcagcgcctgcggctcatagcatcgcggcggggcgacgataatacggcagtgcgtacgctgttcatcctgggtcaacgtcagggtgtggtagccctccggcaatgtagccggaaggttaagttttttaccgcccgtcacgcgccctttgtaatgcacgccctcttccgtagtcagcagccaggcaaactcaccgcgcccctctaccggcaacgccatttttttacccgcggtataaaccttcacattcggcacgaccgcctgtggtcctgttgtcgtgccgtgcatcgccgccagcaaacgtctcttggtttcagcgccaatagactgcggtttgccatgagcattgatgtaactggggctgatccccgccgccagcgcggcactatcgagacgtttattttccatcgcgctcccttagcgttttgcctgccagatacgggcctgataatcgcgaatagagcgatcggaactgaacataccgcagcgcgcggtattgaggatcgcggcgcgcgtccacgcttcctggtcacgatacagcgcatccacctgcttttgcgcctcgacataagcggcgaagtccgccatgaccaggtacggatcgcccccctgtttgccgaggctatgcagcatctggtcaaaggcatgtttatcgccatcgctgtattgaccgctttccagctcttttagcaccgcatccagcactttgtcttttttacgccatttcaccggatcgtagcctttggctttgagcgccttgacctcttccacagtatggccaaagataaagatattctcttcacccaccttctcagcgatttcaacgttagcgccgtccagcgttcccacagtcaacgccccgttcagcgccagtttcatgttgccggtgccggacgcctctttcccggcggtagaaatttgctcggaaatatccgccgccggaatgagcatttccgccgccgagacgcagtaatccggcaggaaaaccaccttcagcttatcacccaccgccgggtcgttattaatggcttccgcaaccttattgatagcaaaaatgatgttcttcgccaggtaatagcccggcgccgccttcgcgccaaacaggaatacgcgcggtacgcgatcagcctgcgggttttcgcggatctctttgtacagcgccagaatatgcaacagattcagatgctgacgcttgtactcgtgcaggcgtttgatctgaatatcaaaaatcgcgttgcttgaaatctcaatcccggtacgggccttgatgaatttcaccagccgttctttgttcgcccgtttgatgtcgcgatactgctgacggaatttggcgtcgtcagcgtatttttcgaggttgatcaactggtcgagatcgttagcccactcttttttcagcgttttatccagcaacgccgcaagctgcggattgcactgtttaatccagcgacgcggtgtaatgccgttggtgacattgtggaatttgttcggccaaagctggtgatattccgggaacagatctttcaccaccagatcggagtgcagcgccgccacaccgttcaccgcaaagccgctgaccacgcacatattggccatgcgcacctgacggtcatgcactaccgccagttttgcccatacctgcttatcgccaggccaggtgttatcgaccagcgtcttaaagcgatcgttaatctgcttgataatctgcatatgacgcggcaacagcgctttcaccagcttctcatcccagcactccagcgcttctggcatcagggtgtggttggtgtaggcgaaggttttgctggtgatagcccaggcgtcatcccagctcagttggtgctcgtcaatcagcacgcgcagcagttccggaatggcgatggtcgggtgagtatcgttcaattgaatgacctcgtaatccgccagctcatgcagtttgcgtccggccagatgatggcgacgcagaatatccgctaccgagcaggcgcactggaagtattgctgcatcaggcgcagttttttgcccgccgtgtggttatcgttgggataaagcaccttcgtcagtttttccgcatcgataccctgctgttccgcccgcaggaaagcgccgtcgttgaatttggtcagatcaaacggatgcgcgtgggtcgcctgccacaaacgcagcggttgcgcgacgccgttacgatagcctaacaccggcagatcccaggcctggcctgtaatcacaaaacctggctcccagcgcccttctttggtgactttaccgccgatcccaacctggacgtccagcgcctcgttgtggcggaaccacggatagctgccgcgatgccagtcatccggcgcttccatctgcttgccctcaacaaatgactgacggaacagcccatactggtagttcagaccatagcccgtagcggactgcccgacggtggccatcgaatcgaggaagcaggcggccagacgtcccagaccaccgttgccgagcgccggatcgacttcctcttccagcagatcggtcagattaatatcgtgcgctttcagtacatcgctaacgtcctggtaccatcccagatttaacaggttatttcccgtcaggcggccaatcaaaaattccatcgaaatgtagttcacatgacgctggcctttcgtcggctgcgctaccggttgcgcgctcagtaattccgccagcgcgccgctaacggcctgccaccactgacgaggcgtcatgtcggacgccgacagtaaaccgaaacgctgccactgacgcgtcagggcggcctggaattgatctttattgaaggttggctgtgacataggaaatccgtcctcgggtaataaaacaacgttatcgctagtttgccaggctcgatgttgaccttcctcctcccggcaatgattagggagggaggaggagcggggatgagcataaaagtgtgatcgccgccacttacccctgtataaacgcgccgattcctgtcaacgacacccagtgttacgcataatcaaatgaataaacagaaataacagtaaatcgcgaaggggtattttcgaagattatatgaacgccgaaatagtttcttacctgaaatattcagcagcaggaggttcactaacttaacataattaattaaacgcctggtatcgccattgtgttaaatccggatgatgtccaggacattatttacaataacggaaatatgacctcagcccagctctgacgctcgtttcaaccgcgccgaatacttttttaataccgttatttagaattgtgacagagtgcaaattcagacacataaaaagtctgcttagcttgcattaaaatgctttctggccgaccttatatctattaattacgaagcgcaaaaaaaatcgcagttccccccatttcccacagtgaagtgattgctatgttgattccgtctaaattaagtcgtccggttcgtctcgaccataccgtggttcgtgagcggctgttggctaaactttccggcgcgaacaatttcaggctcgccctggtaaccagtcctgctggctatgggaaaaccacgcttgtctcacagtgggcggcgggcaaaaatgaattaggctggtactctctcgacgaaggcgataaccagcaagagcgattcgccagttacttaattgccgctatccaacaggccactggcggacactgctcgaccagcgaagcgatggcgcaaaaacgtcagtacgccagcctgacgtctctcttcgcacagctctttattgaactggcgcagtggcatcgcccgctttatctggtgattgacgactaccatttgattaccaatccggtgattcacgacgcgatgcgctttttcttacggcatcagccggaaaatttcaccctggtggtattatcgcgtaatttgccgcaactgggcatcgctaacctgcgcgtgcgcgatcagctgttggaaatcggcagccagcagttggcttttaaccatcaggaagcaaagcaattttttgaccgtcgtctttcgtcgcccattgaagccgctgagagcagccgcatgtgcgacgatgtggcaggttgggccactgcgctacagttgatcgccctctccgcgcgccagaaccatacctctgcgcatcactccgcccgccgtcttgccgggattaatgccagccacctttctgattatctggtggacgaagtactggataacgtggatgtcagcacccgacattttttacttaaaagcgcgatcttacgctcaatgaatgacgcgttgattgtgcgcgtgaccggcgaagaaaacggccagatgcggctggaggagattgagcgccaggggttattcctgcaacgcatggacgacacgggcgaatggttcagctatcacccgttgtttggtagctttctgcgccagcgttgccagtgggaactggcggcggaactgccggagatccaccgtgcggccgcggaaagctggatggaacaaggttttcccagcgaagctatacatcatgcgctggcggcgggtgacgcgcaaatgctgcgcgatatcctgcttaaccatgcgtgggggctgtttaatcacagtgaactggcgctgctggaagagtcattaaaagcgctgccgtgggaaagcctgctggaaaatccgcggctggtgttgttacaggcctggctgatgcaaagccaacaccgctacagcgaagtgaatacgctgctggcgcgcgccgagcaagagatcaaaggggtcatggacggcacactgcatgctgaatttaacgcgctgcgcgcccaggtcgccatcaacgacggcaatccggaagaggctgagcggctggcgaaactggcgctggatgagcttcctctcgcctggttttatagccgtattgtcgcgacctccgttcacggtgaagtgctgcactgtaaaggcgatctcagccagtctttatcgctgatgcagcaaaccgaacaaatggcgcgtcatcatgacgtctggcattacgcgctgtggagcttaattcaacaaagcgaaattcagttcgcccagggattcctgcaggccgcatgggaaacgcaggagagagccttccagttgatcaaagagcaacatctggaacaactgccgatgcatgagtttctggtacgtatccgcgcgcaattgctgtgggcgtgggcgcgccttgacgaagcggaggcctcggcgcgcagcggtatcgctgtgctgtccaccttccagccgcaacaacagttgcagtgcctgacgttactggtgcagtgctcgctggcgcgcggcgatctggataatgcccgtagtcagcttaaccgactggaaaatttattaggcaatggccgttatcactgcgactggatctctaacgccgataaggtgcgtgtcatttactggcagttaaccggcgacaaaaaatccgccgccaactggttacgtcatacgcccaaaccggcgtttgccaataaccattttctgcaagggcaatggcggaatatcgcccgcgcgcagatcctgctgggcgaattcgagcctgcggaaatcgtgctggaagagttaaatgagaatgcccgtagcctgcgcttaatgagcgatttaaactgcaatctgctgttactcaatcagctttactggcaatccgggcggaaaaacgacgcccagcgcgtattgcttgatgccttacagctcgccaaccgcaccggatttatcagccattttgtgattgaaggcgaagccatggcgcaacaattgcgtcagcttatccagctcaatacgctgccggagatggagcagcatcgcgcgcagcgcatcctgcgagagattaaccaacatcaccgacataaattcgcccattttgacgaaggcttcgtcgagcgcctgcttaaccatccggatgtcccggagcttattcgcaccagcccgctcacccagcgtgaatggcaggtgttagggcttatctattccggttacagcaacgaacagattgccggcgaactggcggtggccgcgaccaccattaagacgcatatccgcaacctctaccagaaactcggcgtcgcgcaccgtcaggacgcggtacagcacgcgcagcagttgctgaagatgatggggtacggggtttgaggcaaaacaggcaacgtcctggtgtgtaaatttgtttaatcataaaacctgaaagcaccggttaacatatgggcaaaaacggcgcttttaaaataaatcggcatgcgttcctgttcgttcaaatcgcaggcattcatccgttatcttataaataagaatccagtcaggctcaatatgggcatcccggtatccgctatatgaaccttgtaacgggtgatctttataaatggcaggaaggggaaaagggtggtgaatcagaagcgtcataagtgttttaagtttgccgacatccttatgacgcttttgtgcccgttttacatctttctggaactgtcccgaatattcaatttccctttgccccatagtcagatccctaactggtcaaacaaatcatcagcatctttggctttatgaatatcaacgccagcttcgctattttctatcgttcgggacgttaactcattgggtatgcgcaaatcaaaaggcaatgccttttcacgcgcaactttagtcagtgtaatccgtatcaaatcagaaatggttaaccccatttcagccaggacatctgccgcctggtccttcagcgtttcgtcgatacgggcacgaacaagcgcatttgcagccatcgattagtctcctgtactgtgtctctatacagttcaaattgtagctcaactgagacacacatacaaaccgggcccggatgtttgccttgcaatgctcgtaaagatgacttagtcgcttacccggacaagatagccactttcggttgcttcacaggaaaatctgaccggcaaaaaccgttccaccaccgcaatattggtaagcaagtgagcggaggcccgtgccacggtaaacgcgccctcgcccgccagcgccagcggtaaaatcagctggtcggccagatgctctcccaccgccgccgggcttgcgagatagcgccgcgcttcatgcgcaacctggttagctaccgcttccgcgctggtgccttttacgccgaacgcggcgaacagttcggtcagttgttcgctttgaatcatcagcgacagcgcgttgcccggcccgcagccgccttccagcgcaacgacgtttttctccgcctgcgggaagtgggcttccagcgttgcgacttcacgttcgccaacgtggtaaggaaccgccgccagcaaagcttcagcggtggtgcgcagcgtctcgccgcgcgatatcagcgtcagaccgcgtaaagacgctgccggttcgacgaccgttgccgccgcgccgccgcctgccggataaaagccgtgttttatcagcgtggtgcgctggctgatgcccatcctcgccaacagcggttcccagacgcggcagataaaatcagcgctgggcgcggcctgattatgcgtcccgccgtgaacctccacgcgggatgaaccgtcagcaaaccacagcgcgggcaggacggtttgcagcaccagcatacaactgcccgcgctgccaatcgcaaaacggtactcgccgccgcgaatcggccccggcgtaaaacgcaactgttgcgagcccagctcgtcgccgttcacctgcgcgccgcagatttccgttgccgctcgcaccgccgttaaatgctggcgtagcagccccggtttagcgcgcccggcgcggatgccgctcatttcaaacggctggccggttatcattgataaactcagcgccgagcgcaaaatctgcccgccgccctctccctgtgcgccatccagcgcgatgatccttgccattttctatcctttaacgcacaccacctgccgcagggcgtacatgatttcaaccaggtcggactgcgccgccatcaccgcatcaatatctttatacgccattgggatctcgtcgatcacgtccgcatctttacggcattcgacatgcgcggtggcacgaatttgatcgtcaacgctaaacagtttcttcgctttcgttcggctcatcacacgtccggcgccgtggctgcacgaacagaacgactcttcgttacccagcccgcgcacgataaagcttttcgcccccatcgaaccgggaatgataccgaactcaccgcgccgcgccgaaacagcccctttacgcgtcacatagatctcttcgccaaagtgctgctctttttgcacatagttatggtggcagttgatctcgtccatatcgagggcgctcggtttttccacgcagcgctggagcgccgccagcgcgttttccatcatcgcctcgcggttcaggctggcgaattgttgtgcccagtgtaccgctttcaggtaatcgtcaaaatattcgcttccttcattaaaatacgccagatcgcgggacggcagcgtttctaactgctcctgcatttcttgctgcgccaggccgataaaataggtgccgatggcgttaccgatcccgcgcgaaccggagtgcagcatgatccatacccgatcggtttcatccagacagatctcaataaagtggttaccggttcccaacgttcccaggtgcttatagttattggtattcaaaaagcgcggatatttttgcgttaaccactgatatcccgcttccagttgcgcccatttttcattaacgttggcgggcgggtttccccatgcgcccacatcgcgatgcccgcgtccggtggtacgcccgtgaggcacagcggcctctatggcgctacgcagatccgccagattttccggcagatcggccgccgttaagctggtacgcagcgcgttcattccacaaccgatatccacgcccaccgccgccggaataatcgcccctttcgtcgggatcacgctaccgatggtcgatcctttccccaaatgcacatccggcataacggcaatatgtttgaaaataaacggcattttcgccgtattgatcagctgctgacgggcatcgtcttctaccggtacgcctttggtccacatttttaccggtgcgttctgggtggtcattaattcgtaattcatcatttttttctcgttttaatcattagggtggcgacaagtttatgtgaatacaccgctctaccattgagctacagcgccgggctctgacgggtctcgaacccgcaacaaatgtagatccacaggcattcgccaaaatagggtggcacgacaagttaaggtgaatcacccgctctaccgttgagctacagggctaagccccggcagggttcgaacctgcgtctggccatacaaggtgtagatccaccagcatttgtgccttcagcgttgcgcgacaaattcatagccgggatgatacgcatcgggaaagatgtaatcccggccagcattcgcgccgcgctgaatactctttacaacgtcacggcttcaatctcttccagccagtgcgcgctgccatagtgaccgttaacaaagttatctatcaccgtaaacacctcgtcgctgaagccgccgacgttcaaaatatcgcttcgttccgccgcctgggtggtgccgtaaggcagcagatcgatacacaccaggcgcgcctgcgggttgcgctgaatactctttacaacgtcacggcttcaatctcttccagccagtgcgcgctgccatagtgaccgttaacaaagttatctatcaccgtaaacacctcgtcgctgaagccgccgacgttcaaaatatcgcttcgttccgccgcctgggtggtgccgtaaggcagcagatcgatacacaccaggcgcgcctgcgggttgcgctttttcagttcgatccagcattccatggtggccgttgagccatggcgcgatttatcaacccacgattcgttatccgacaccataatcaccagatccacccgcgcccgctcgttcaacaacctacgcagcggcgcggagcagttggtgccgccgccgccaaccgccgccagcttttgcgcgttgtgcatgaccgactggcgcgcatcaagccgcacgtcgaccacatcgcattcaaacggcagcacgcgggcctgcggatgattacgcagcacggcggcggcgatcagcccggcaacgtccacgcagcggatcttactggtctcccccttgcgatagccggttatcgacgacttcatcgaccccgacacgtccgggcagaccaccacattgccgcgaaacggcggaatgttctccagcgcgtactccatcgcctgcgctaaagcctcgcgaataacctgcggcacgccgctttgcagattgctccacgccgacagcaactgataaggataaacccaggactggcgcacctgcgccctgtccgccagccgctgcgccacgctggcggcaagcgttgcattctcaaacacgtcatgacgcgccagcgtattcaaattcatccgtaacgtttgccaactcatccgctgcgccagttgcgcccactgttcgcgactcagcggcgcgttggtcagtagtaaaaacgacacatcgggtaaggccgcgcccatgtcgccttcacgaaacgccagcagcgcgcgcgttttttccggcagctgcgccttatcgcacggcttaccaatcagccaggcgaagaaggcttcctgccacgccgcctgcggccgtgggtgcaccattttgacgatatccgccagcgacggcgcattgcccaccgatgcctgcaataagcgctcttcgctggcgttctgcaaccaacgctgcaccagcttctttggccgcgtccccagcgagcgccgcccggtcacgccgctgcgcaacatttgcacaaagttacgcagcatccggccattgttgatcacccgcgtaaatactaccggcagcagcgccgaaccacgcgccgccagaatggcggtcaacagcgcgggcatatccttcatcatcccgcgttcgcggccataaatcgccagttgcgctaaaaacagatcgtcgagatctttcgccgtcgccagaacatcatttagctgcgcctggccgctggcataaaaagtctcgttcatgcagccggtcatcaccatttgcgccagtttatggcgcggggtgaaggcaaaggccgctgcgccttgctgattgctggcgttggccagcggcgcgtcccttaacagcgaacggaacaaaagtggattagccatttgtttttcccatttccgttattctccatgccatggttattgcaaccagcgtgccagaaaataaattattttttaatctattgatttttaattgatttatttctttagcgttcaagtgaaagaaaaatgcctgcacggtagtcattaaaaagcgataaaattatctcgtcttttagaaggaaatctaagatgcgaaaaacggtggcctttggttttgtcggtacggtactcgactatgcaggacgcggcagtcaacgttgggaaaaatggcgccctactttgtgtctgtgccagcaggagacgctggtcgttcaccgcctggaactgctgtacgatgcccgctctcgctcgctgtttgaaggattaaagaaggatatcgccagcgtctcgccggaaacggaagtcgtcggcgtagaaatcgcgatccgcaacccgtgggacttcgaagaggtttacgcctgcctgcacgatttcgcccgcagccatacctttcatcccgaagatgaagactatctgattcacatcaccaccggcacccacgtcgcgcagatctgctggttcctgctggcggaggcgcgctatcttccggcgcgattagcgcagacctcgccgccgcgcaaaaaagataaaccgcatagcacgggcgacgtgacgattattgacctcgacctcagccgctacaatgatatcgccacccgcttcgcccaggagcgggaggagacgctcaacttcctgaagtccggcattgcaacccgcaacccgtgtttcaaccggatgattgagcaaattgagcgcgtcgcgatacgctcccgttcgccaatcctgctcaatggcccgaccggcgcgggcaagtcgtttctcgcccgtcgcatctatgaactaaaactggcccgccaccagttcagcggcccgtttgtcgaagtgaactgcgccaccctgcgcggcgacacggcgatgtcggcgctgttcggccacgttaagggggcgtttaccggcgcgagagaggagcgtgcagggctgctgcgcagcgccgacggcggcatgttgtttcttgacgaagtgggagaactgggcgcggatgaacaggccatgttgctgaaagccattgaagaaaaacgcttttaccctttcggcagcgaccagcaggtcagcagcgatttccagttgattgccggcacggtgcgcgacctgcgccagcgggtggcggaggggacattccgcgaagacctgtacgcgcgtattaatctctggaccttcgaactaccgggcctgcgtcagcgccaggaagatattgagccaaaccttgactacgaactggaacgccacgcggcgctaaccggcgacagcgtgcgttttaataccgaagcgcgccgcgcctggctgagcttcgccacctcgccgcaggccgcctggcgcggtaacttccgcgaactctccgccagcgtcacccgcatggcgacgctggcggacaacgggcgaatcacggtcgaaacggtagacgatgaaatcgcgcgtttgcgctatagctggaatgaccatcgcccctccgcgctcgacggactgccgggcattgacgcaacggcgctggatctgtttgaccgtatgcaactggaaaacgtcgttgcggtctgccgccaggcgaaaaccctttccgacgccgggcggcagctattcaacgtttcccgtcaggggaaagccacggtgaatgacgctgaccggctgcgtaagtacctggcgcgttttgggctgacgtgggacgttttacagaattaacacagctccagttgaatatggttctccgtcaacacctgcatcacgcccggcggcggcagggtatcggtgtagaccgcatcgaccatactaatgctgcccatgtttaccatcgcgttacggccaaatttagagtgatccaccaccagcatcacgtggcgcgaattttcgataatcgcgcgcttggtgcgtacctcatggtagtcaaattccagcaacgagccgtcgctatcaataccgctaataccgagaatgccgaaatcgagacggaactgggcgataaagtcctgcgtcgcttcgccaataatgccgccgtcgcggctacggagttcaccgccggcgaggataatacgaaaatcctctttcgccattagcgtgttcgctacgttcaaattgttggtcacgatccgcaaattactgtgccctaacagggcgtgcgctacggcttccggcgtcgtgccgatatcaataaacagcgttgaaccattggggatctgggccgcgactttgcgagcgatgcgctctttttcttccgtttgcgtcgccttacgatcgtgccacggcgtgttcaccgagctggagggcaacgccgcgccgccgtggtggcgcaaaatcatattctgttccgccagatcgttaagatcccgacgaatggtttgcgggctgacagaaaaatgctccaccagctcttccgtactgacgtacccctgtttttttaccagttcaatgatcgcgtcatgccgttgtgtttgtttcatgaataatctctgaaagtaaccaaccttgcgccggatagcggcattcgccctacccggcctggaaaaatatctcgaccacaggccggatacgcctcacgttcgttttcgcgcattcagcgtatcaacaaaggccatcgctaaaccgacgataagcccggcgatgtgcgcgccgttcgccatagacatgccaaaccagtcaaaccaaccagcgactatccacaataatgcaaaaataattaagccgcgctggaggtaaattccgctttgcggatcgcgctctccacgcagccacacgtaacccatcagcgcatagacgacgccagacagtccgccaaaccacgggccgctaaatttctgctgtacatagccgcttagcagcgcgcttatcaccgtaatgacgattaatttaccgctgcccaggcgcttctctaccgccccgccgagataccaccaccacagcaggttaaaaagaatatgcatcagtgagaagtgcataaagatatgggtgaagtagcgccagacttcaaattttaaaaccggatcgaacggccacgccagccacaccatcaccgtctgatcgccgatgagactcatcgcgatatagaccagcacgcaggcgagcatcacgatccaggtaacagggccggctcgttcacgcagcgtggcgagaaagggaaaacggcgatagcgtagcccgctgttagtctgcccggactgccagctagccgccagataacgcggatcgccgggattttctataaaccgcgccagctcgccccgcacacgttcggcctgcgattcatctgccaaccagatatcgctttgattatgttgctgaatagtaagaatgacgccctgggtggccatgtaatcaacaaatgcctgcgccacgcgaggattcgcaaaggaagtaatcatcaacattattgctgtcgcttagtccatacaaaagaagacagtatatatacccttctcgtcggaggctgcatctttatgggattacgcgccattcgcgacatcggcagggaaacggcgatgccaggcctcaaacccgccgtcaatgctgtaaaccgcatcatagccttgctggagcagatactgcgcggcgcctttactactgttgccgtgatagcacattaccatcacggcggtatcgaaaccatgctcacgcataaacgcgcccagcgtatcgttagtcaagtgaaacgcctgcggcgcatgacccatggcataactttgcggatcgcgaatatcgaccagcaccgccgcgccctggtgcagtttctgatacgcctcttctacagtgatacattcaaattgttccatgaatcgctctttcattattgccggtgaagccaattaaggcattttatcgcccagtgtacgttgacggagtagcttagcgccataatgttatacatatcactctaaaatgttttttcgatgttaccaatagcgcgtttctttgctattatgttcgataacgaacatttttgaactttaacgaaagtgcaagagggcagcatggaaaccaaagatctgatcgtgataggcgggggcattaacggtgcaggcatcgcggctgatgccgccgggcgcggtttgtccgtactcatgctggaagcgcaggatttggcctgcgcaacctcttccgccagttcgaaacttatccacggcggcttacgctaccttgagcactacgagttccgtctggtcagcgaagcgctggcagaacgtgaagtgctgttgaaaatggcgccgcacatcgccttcccgatgcgttttcgtctgccgcaccgcccgcatttacgtccggcctggatgatccgtatcggtctgtttatgtacgatcacctcggcaaacgtaccagtttacccggttccaccggtgtgcggtttggcgcagattcggtgctcaaaccggaaatcgtgcgcggattcgaatattccgactgctgggtagacgatgcgcgtctggtgctggctaacgcacagatggtggtgcgtaaaggcggcgaagtccttacccgtactcgcgcaaccgccgctcgtcgggaaaatggcctgtggattgtcgaagcggaagatatcgacaccggtaaaaaatatgtctggcaggcgcgcggactggttaacgccaccggaccgtgggtcaaacagttcttcgacgaagggatgcacctgccgtcgccatatggcatccgcctgatcaaaggcagccatatcgtcgtgccgcgcgtccataatcagaagcaggcgtatattctgcaaaacgaagataagcgtatcgtctttgtcattccgtggatggaagagttttcgatcattggcacgaccgatgtcgaatataaaggcgatccgaaagcggtaaaaattgaagagagcgaaattaattacctgttgaaggtttataacgcgcacttccagaaacaactggggcgcgatgacatcgtctggacgtactccggcgtccgtccgctgtgcgatgatgagtccgactcaccgcaggcgatcactcgcgattatacccttgatattcatgatgaaaacggcaaagcgccgctgctttccgtgtttggcggtaagctcacgacctaccgtaagctggctgaacacgcgatggaaaaactggcgtcttattatccaggcatcgggccggcatggaccaaaacgtgcgtactgcccggcggcgacatcgacggcagccgcgaagattacgcggcgaagctgcgtcgtcgttatccgttcctgacggaatcgctggcgcgccactattcgcgcacttacggcagcaacacggagtggattctcggcgaagccacgtcgctgcttgatttaggcgaagatttcggtcatgagttttacgaggcggaactcaagtacctggtggatcacgaatgggtgcgccgtactgaagacgctatctggcgtcgcaccaaagaaggcatgtggctgaccgccgaacagcagtcccgcatcacccagtggctggcggcgtatgttgagaaacaccaactttcaatggcgtcgtaataaaatccggggcggtttataccgcccttttcgccacataccgcattcactcgccgggttttgtacagccgggcatatgattagtgatacggtagcgatcgacacttatttgggtaataaagaagggttttgcccgcgcttcgctattccagagagttttccccgttttacaccagcttttatgagaaaagttggcataatgaaccacactctcctcccccagcacgctttcaaaatgcgcgcgtttatcaccgtcggccacgctaaagtcagcataaaaaagattgctgtccaggttaaacgtcatctctatttcactggcggacgatggaaagaacacaggcagccaggtccagataccggattgctcgggtatggcggcataatcaggaaaatagcttacctggcgatcatcgcaggcggtcagcacagcgatgatgattaatgctgcaccacaccggaggacctgattaatcagctcagcaacaatatctttatgccacgaagtggattcacgccgtgcaatacgaatatcagcgccgctggccgggtctatgccaacccgttccacatataatttaacctcttccatttagtccctttatttcgcggccggatacagcggcacatatcccacatcctgcaccaactgttgtccctgcgggcttagaaaccagtccaccagcttttgtgtttccgctgtggggtgttcacgggtgaccatataaacatcaaccgtgtacgggtaactgccgttacgaatattttcaaccgtcggcgcaacatcgtttatcgccagtaatttaatctctttattgctgtgcatctgcgtagcgtaataacgaaaggtatagccaatggcgttgtgcgtattgcgatactcagccacgatatccaccatatcccccatcgcggttgccactgatgttgtttgcgctggcatcagcttcgtttctttcattaccttcgccagcatcgccgtttggctgccagagttttccggtcgctgccagggcttaatgtcgattgcctctccgcccacctcattccagtgggtgattcttccgctaaaaatgccgcgaatttgtacatcactcaacgatgacacgggattgttttggttgacgataaacacaaacgcttcacgtgcaaagggggtgtaaaccagttttacgccactggcctcggccaattgcttttgagcagtggaaggctgggcgacaaaaataagatcggcattaccgttaaggatattttgataggcttcaatggttccctggttttcaaggtagtcttcagggcagatatcatccggaaagcgcgtaagcgcataaaaagccgaggcgtataacggcaagccagccgttgcgccatcgagccgcggccaattttgagtgagcaaaagtgtcggttcatcgcgcagcccggttagcttgttgccccatgtgtgcgcctgataatcgcggaaataaagatattcactgctctcgggagcgggatacttcacggcataaagatgtgactggtatacggcacagctcccgaaaaacagcaggcaaatcaccagcaggttacgacaagtgtagcccgcaccgccgcgtagcactccccaacgcgcaccgccataccctaatgcaaaacagagctgcgagccaaccgggatgagcaacactgcccatacccagccgttgaaaaaggatattacgcggggtactaaccaaagcgtttgcaccacctgggcgatgggcttacaccctatcgcgcgaatattaagatcggtgagaaacatcaggatgacccaccccatcagcaccaccagagcgggcataagcaggcagcaatcacgccattctggatttacctctgatgcatttccctttccccatatccggccacaaagaaaaattaaccctgcgcccagaagcgctaccgggataatggtcgcctcctcaatagatcgcgcgacggggatactattttcaagaacgctaatgtacgcccacattccccccacgataatcgtaataatgttcaccagcagcggcacgccgataaacgccattatgattgacaaaaaaagccaattagcatttttcatttttctatccgctaatccctgcgataacggaagtataaacccggtagtcctgagcccacccatgcatttttctgaaatcgcgacgttaaaacattcacgatagcggcagacagaagttgaaagttccggctgccgttttttatttacaggctcacattaacctgcaagatcgatctttttccgcgcctgcccaacagcatcggcggcccgcaatgccgcctgcacagcctccggcgtaatggtaaacggctcgttgtgtatcgtttccccagtttgacaagacgccctggcaacggccagcagttcatcatcgctaacgccagccagaccaatatccgccagcgtggtgggcaagcctatatcttcacaaaattgataaacctcctcgataagctcaggcgctctatcggtgagcataagcattgccagcgtgccaaacgcaaccttttccccatgccagtatttgtgcgtggcgggcagtactgtcagaccgttatgaatggcgtgcgccgccgccagcccaccgctttcaaaaccaagcccggataatagcgtattcgcttcgataacatgttcgagcgccggagtaacctgatgttgttcacaggcaagtttcgccaggcgtccatagcgcattaaggtggtgtagcaaaagcgcgccagctcaaatgcggtcatcggtcctggcctggtggtcatattgccggcccctttgatgcggcaatcttccgcttcaaaccaggttgccagcgcatcgcctatcccggaaaccaaaaagcgtaccggcgcggcagcaataatactgctgtccaccagcacaagcgtcgggttacgtggaatcatcaggtagcgtttgaatttcccttctggcgtatagataacaaccagtgaactgcacggcgcatccgttgaggccagagtaggaaccacggcaataggcagccgcaggctggcgccggttgcttttgccgtatccagggttttcccgccccccataccaacaatcacatcggcgccaatttcctgcgcgcgtgcggagatgcgagcaatttcctcatcacagcactcgctactgaacacttcgatatcaaattcaatcaccccgtgcagtgctgttgcaactgtatcccggtaggtgttgtgaacaacaggatcctgcaaaatcagcgccttatgaccgagtgcggccaattcctgcgggagatgcgttgtcaacgctcctttaccctgaacatatcgtgacggaaagatcgcggtagtaaccattgtttctccttaaaaagcattaaagttcaatatacagaacacaaattccacataaagaatttaatgctgtttactctgaacgcacaatgaccaggtgagagcataatcttatcctgtgaggcagcgcacaattttggcgatgtattagaccgatgagcagtttccattgggttatccgctctttctcaccttatctccgttcatttttgaagcaaatcacaaaatataaccttccttagagtatggaattgacgctgtatgaatacgtcggcatagtgtcaatatacagaacagaagttccatatacagaacacatttttgatactaaagggatgcaatgatgagcattgaaatagagaaaccgaccacacgagggcgctggctgcatattattccagccacgatcctcgtttatatcgtggcctatatggacaggaccaatatcgccattgggatcgcaggcggcatggatgaagatttaggcatgacggcttcttttgccggtctggtagccgggatcttctttattggttatatcttcctgcaaattcccggcggtcagatagccgagcggctaagcgccaaaaagttaattgcctggacaatcgtcgcctggggtggctttgccctgctgaccggttttgttcagacaccgacgcagttgttgattattcgctttgtgctcggcgtggcggaaggtgctgtgtatcccgccattctggcgctgattggccactggttcccaaatgaggagcgcgccagggctatcgcctatttccagatgaacctggccgtcgcttctattattaccgggccgctttccggctggcttattgaaacctacggctggcgggagatgtttatcatcgaaggcttgctctctctgggactgctctttgtctggctacctttggtttccgatcacccgcatcaggcaaagtggctggatccgaaagagcgcgcctggatcgaacaaaaattgctggccgatcgcgcgttgagtattggcggagaacaaagcagcattcgcggcgtattaaaaagcatcaacctgtggaagcttgtcggtatctatttcttcgtacaggtcggcttctatggcttcgcgctatggatgccaaatctgattaaacacctgaccggcagcggcatgaccatcgttggggtactcactgcggcgccttacgttctgtgcatcatcggtcagtattacatcgccaaatggtgtgataaaacgatgaatcgccgcctttacacggctattcctctgctgggtttcgcggtctgcctcgccctctccttattactgaaagataacgtctggctcgcctacggcatgatggttatttgcgggttcttcctgcaagcctatgccggtccattctggacgctgccgccattactcttcgcccccaacgttctgggcggcgtgcgcggcacgatcaacgccctgggcaacatcggcggctttatcggtccgtacctcgtcgggctgttaacggtgacgttctcgcaaacagcaggaatgaccgtactggttgccgccctgcttatcgccgttggactgcttttcagcttaccttctgttaccgctcgtcctgcaggtagcagcaacacccctaacacctcgacgccgggtgcgtcacttaaacaggaaggaatcgccaaatgagccaaaaatgtcaacatgctcgcgacctgtggtcgcagctcgacgccctgcgtcttggaatgaattacagcaaagaagatgtcaataaactgcaggtcctggtggatgattgctatggtgaaagtcatccgggcagtttccatcttaaccaactgggcgatgaagccgtgctgggtgttcatgaaagcggcggtcgcgcggtccgtcaccatgtgacggatatctgcgacggctggggtcagggccacgatgggatgaactacatcctggcatctcgcgaagccattgccaacatggtcgaaattcatgcctcagtggtgccttatgatgccggtattctgatctcaagctgcgataaatctatcccggcgcatctgattgccgccgcacgcctgaacctgccgctactgcatattcccggcggttctatgcgtccggcaccgaatatgagtacttctgacctcggtgggatcactgctaagttgaggaaaggcgaaatcggcattcagcaagtggaagccatgcagcaatgcggttgccccaccgccggagcctgccagtttatgggaacggccagtaccatgcagtgcatgtcggaggccttggggctggccctgccaggcagcgctttgctgccatcgaccctggcggaaattcgccgcgttgccagaactgcaggccaccaggcgctgtatctggcggagaaaaatatcaccacccataagatcctgactcctgcggcgtttgaaaatgctatcaaagtccatgctgctattggtggcagcaccaatgcgatgatccaccttccggccatcgctcatgaacttggatgggagctgaagcccgaactgtttgatcggatcaataacgaaatcccttatctgaccaatattcagcccagcggtgaatacgttaccgaaatgatgtggttcgctggcggcgtgccaatggtgcaatggtatctgcgcgattatctggatcttgatgtgcttaccgtgactggccgtacgctcggcgacaacctggaaatgctccatcaatccggcttctttacccgcaaccacggttacctcaacaattacaaagtcagtccggaggaggtgatccgtaaaccagaaaatgccaccaaaaaagggtcgattgcggtactgaaaggcaacatcgcgcctgaaggagcggtcattaaatacgcggcctgtgcgccggatatgcaccaccataccggtcctgctcgggtctttaactccgaagaagacgctcagcaggccatcatccataaccatatcgaacccggcgacgtcattttcattcgctacgaaggcgcaaaaggctctggcgcaccggaaatgctgatgactaccgatgccatagtgtatgacaaacgcctcgacggaaaagtcgcattgattaccgacggtcgtttctctggagcgaccagcgggccatgtgtcggacacgtctcgccagaagccgctgatggggggccgattgccctggtggaagatggtgatttaatcgaaatggatgtgaaaggccgcaagctcaatattgtagggatcgacgggatgcctaaaacagaagaggaaatacgccgctgtcttgaagagcgtcgagcaagctggaagaaacctgattattcaaaccgtcgcggcgtctttaaacagttcaccgctaatgcaacatcattaatggccggagcctggcttaaataatatccctggcgggctacggctcgcctgttttaaggatcaatacatgactcagattacgaaatttcacggcgtatttccgccagttccgaccattgttaatgcgcagggagagttagataaagtcggcatggcaaccttgctggatcatcttattgcaagcaaggtcaatggcgtattactgctgggcagtggaggggaattttgccatatgaccaatgcgctgcgtctggaaaccgcagagttttgcgtccgtcatattaaccgccgtattccagtactattaggtattagcagcaccagcacgcaggaagtgattgagtatggtcagcatgccgaccgactcgaagtcgatgccgtgctggtactcaatccctactatgccagattgaccgatgagtatatttatcatcatttcaaaaccgtggctaataacataaaaagcccggtgattctctacaactttccagcattgacgggacaggaccttagcgttgatttaattacccggctggcgcaagatcaccccaatattatcggcattaaggataccgttgataatatcagccatattcgtgaaatcatcaataatgtcaggccagtgcgtccggacttcgttattttctccggctatgatgaatatatgatggatacgcttatcttaggcggcaacggcgggatcccagcgacagcgaactttgcgccacagctaacctgcgggatctaccgcgcgtggtgtgaaaaagagtatgagaccatgttcggattacagcgcaggctgtccgcgctttccactatttacagcctggattcacctttcttcgggataatcaaaaaggcaattcagcttagcggagtcgatatttcaactcatgtaatgccccccgttttgccggcaaatgaagaacatatttcgaatttgaagcagatcttacagcgtgcgggactttaagcgatgacgaaagcgggcttcttgcccgctatgtctttttatttcagcacatcagacgcgtcaggctacggctggcatccatcatcagcgtagcaagcgactcgcgtttatcatcggggatctggaacgtaacgccggatacgctcagggcggcgatcactttcccctgcgtattgaataccggcaccgcaatgcagcgcacgccaagggagtcttcttcgttatcataaccccagccgcgacggcgaattcctgctaactcctgcttaaggatattcacatccgtgatcgtcgtatccgtaaaacgcgttaatatctgatctggaggcagcaactcctccagctcttccccgctaagccatgcaatcagcacctttcccagccctgagctatgtaatgagaggcgcttgccctcccagcttcgaatcacaatagcctgtgggctttcgactttcagaaggtaaataggggcatcgccctccagaacgccaagatggcaggtcaggccggtgttatcgcgaatctcttcaagaatcggtaacgcgatttttttaatatcgtactgttccgccgctttattacctaattcatacaggcgtagccccagataatacttgtctttttcctggcgtaataacccatgctccaccatgccgttgagcaaagatgaggtactgcttttcgcaatccctgaattttgatggatctgggtaaacgttgcgccatcgcactccagaaggtaagcaaatacgcgcataattttatcgagagccggaatagatgtcgtaatctttttcatattattatcaattaattatggatttttctgctaatactatacaccagtactcgaccctttttccatgacagagaccaagtgccgctaacagattcagcagacgaatatcggcataccccccgaatataccacgataaaaaacggggccgtttggccccgttctcaagcgttaaaccgctacaaccgcaccggatcaatatgccagatattttcggcatactctttgatggttctgtccgatgagaagtagcccatattggcaatgttgagcatcgctttcgtcgtccattcttccgggcgacgatacaactcatccaccttatcctggcagtccacgtagctgcggtagtccgccagcacctgatagtgatcgccaaagttaatcagcgaatctaccagatcgcggtaacggcctggctcttccggattaaagacgccgctaccaatctgcgtcagtacctgatgtagctcttcatctttttcataatagtcgcgaggcttataaccctgcctgcgcaacgcttccacctcttcggcagtattaccgaagataaagatattctcctcgccgatatgctcctgcatctctacgttcgcgccatccagcgtaccaatggtgagcgcgccgttcagggcaaatttcatattactggtgccggaagcttctgtccctgccagcgaaatctgctcagacaggtcggcagcgggaatgatcacctgcgccaggctgacgctgtagttcgggataaacactactttcagcttgtcgccaatctgcggatcgttgttaatcactttcgccacgtcgttgatcagatgaataatgtgttttgccatgtaataggcggaagccgccttaccggcaaaaatattcacccgcggcacccagtcggcctccggattttctttaatgcggttatagcgggtaatgacatgcagtacattcatcaactgccgcttgtattcgtgaatacgcttaatctgcacgtcgaataacgctttagggttcaccaccacattcagttgttgcgctatcactaccgccagccgttttttattttccagcttcgcctgacgcaccgcatgattgaccagcggataatcacaatgctgcttcagctcgctgagctggctaagatcggtacgccaggtacgaccaatattctcatccagcacgtcagaaagcggcgggtttgccagcgccagccagcggcgcggcgtaacgccgttagtgacgttacaaaaacgggtcgggaaaatcttcgcaaaatccgcgaacagcgactgcaccatcaggttggaatggagttcagaaacgccgttgactttatggctgaccaccaccgccagccaggccatccgtacccggcgaccgttcgactcatcaataatcgacgcgcgtccaagcaggctggtatcgttgggatattgctcctgcaccgttttcaggaaatagtcgttaatctcgaagataatctgcaggtgacggggcagaattttccccagcatatcgacaggccaggtctccagcgcctcgctcatcaacgtatggttggtataagagaagacctgacagcacacctcaaacgcgtcgtcccagctaaatttatgttcatcaatcagcaggcgcatcagctcaggaattgacagcaccggatgcgtatcattgaggtgaatggcgattttatccgccagattctcataggttttatgcagttgataatgacggtgcaggatatcctgtaccgtcgccgagaccagaaaatactcctggcgcaggcgtagctctcgtccggaataggtggaatcgtccggatagagcacccgtgaaacgttctcagagtggtttttatcttccaccgccgcaaagtagtcgccctggttgaatttaccgaggttgatttcactactggcctgcgcattccacagccgcagtgtgttagtggcgtcggtgtcgtaaccggggatgatctgatcatacgcgacggccagaatctcttccgtctcaatccagcgcgcttttttaccttcctgctgaatgcgcccgccaaaaagcaccttatagcgcgtattgtggcgcttgaactcccacgggttgccatattccagccagtaatccggagactctttttgccgcccgtcgacaatattctgcttaaacatgccgtaatcgtagcgaatgccgtacccgcggcccggtaatcctagcgtcgccagcgagtccaggaagcaagccgccagccgtcctaagccgccgttgccaagccctgggtcattctcttcatcgatcagctcttcgagatctaagcccatggcctccagcgcgcctttaacgtcgtcataaatgcccaacgagagcagcgcgttagagagagtacgaccaatcaaaaactccatcgacaggtaataaacctgccgggtttcctgcgataattgggctcgattagaacgcagccagcgctccaccagacgatcgcgcaccgcgaacaacgtggcgttcagccattcgtgtttattggcaatgaccgggtctttaccaatcgtaaacatcagcttataggcaatagaatgcttaagcgcctcaacgctgagagtgggcgatgcataagtaaacggagcattcatataaatgattcctggatgactatttcaagcgatagtacagctcgcggtatgatttcgcggcaacttgccagctaaaatccatcgccatcgcctgccgttgtacaaaccgccaaagcgaaggccgtgaccacaacacaaaagcacgccgaatcgcgcgtagcaacgaccaggcattactgtcttcaaagacaaaaccgctggcgataccgtccgccagattttccagcgaactgtcggagaccgtatcggccaaccccccggtacgccgcaccagaggcagcgtgccatactttaagccatataactgcgttaagccgcacggttcgaaacgactgggcaccagaataacgtccgcgccgcccataatgcgatgcgagaaagcttcgtgatagccgatctgtacgccaacctgccctgggtgttccgccgccgccgcgaggaacccttcctgaagcaccggatcgcccgcgccgagtagcgccaactgcccgccctgctccagcagccccggtaacgcctccagcaccagatccagacctttctggttggtcagacggcttaccacggcgaacagcggcactttgtcgttaaccttcaaccccatcgcaatttgtagctgacgtttgttttccgccttctcttccagggtatcgcgcgtgtagcgcgacgccagcagcagatcggattccgggttccagatcttctcatccacgccgttcagtatgccggacaagcgcccttccagatgacgctgacgcagcaggccttccataccataagcaaactgcggttcagtaatttcacgcgcataggtcgggctcaccgccgttatatggtcggcatagtacaaaccggccttcaaaaaggagagttgtccgttgaactccagcccatgcatattaaagaatgaccacggcagttcgatgtcatccatatgctttgcataaaacatgccttgataggccaggttgtgtacggtaaagaccgatttcgccggccgcccgcgcgccgccagataggcgggcgccagcccggcgtgccagtcatgggcgtgcaccacgtcggggcgccagaatggatcaagtccgcaggccatttcacagccgacccaccctaacagggcaaagcgcagcacgttatcggtataggcatataaattcgtatcgtgatagggactgcctggacgctcgtacagatgcggcgcgtcgatcagataaatgcccacgccgttataatgcccgaacagcagcgatatcttacctgcgaaagtatcgcggcggctcaccacatgcgcgtcgggtatcccccgacggatatcgggaaaccctggaagcagaacgcgaacatcaacaccatccgcaatttgtgccgcaggcaacgcgcctatcacatccgccagccccccagtcttcagcagggggaacatctctgaacatacatgtaaaacctgcattatcgctcctgtttgacctgcagtttgcgcagcatttcacgcgtgaccagtacaataccttcttctgaacggtagaaacgacgagcgtcctcttccgcattttcaccaatcaccatgccttccgggataatacaggcacggtcaataacacagcgacgtaaacggcaggagcgccctacccaaacctcaggtaacaacactgccgaatcaatattacaaaaagaatttattctcacccgtgggaagagcacagattgcaccaccaccgaaccggagataatgcagccgccggagaccagcgagttcagcgtcataccgtggctaccggagcggtcctgcacgaatttcgcaggcggtagcgattccatatgcgtacggataggccagttctggtcatacatatccagctccggcgtcaccgaggctaaatccaggttcgccttccagtaagcttccagcgtacctacatcgcgccagtacggttcggcttgtggatcggactgcacgcaggagagcgggaaaggatgcgcgtaagccataccttcgcgggtgattttggggataatgtctttaccgaaatcgtggctggaagcgtcatctttatcgtctgccgccagcaattcatacaggtaatcggcgtcaaaaacgtaaatgcccatactggccagcgatttgctggcgtcaccaggcattgcggggggattcgccggtttttcgacaaaatcaataatcttgtcgctttcatcgaccgccatcacgccgaacgccgtcgcttctttgatcggcaccggcatacaggccaccgtgcaacgcgcgcccttttcaacgtgatcgatcaacatacgcgagtagtcctgcttgtagatatgatcgcctgccaggatgacgacatattccgctttatagcgacgaataatatccaggttctgggtcaccgcgtctgccgtgccgcgataccagttttcgcccttcatacgctgttgggctggcagcagatcgacaaattcgttcatctcttcgctaaacagtgaccagccgcgctgaatatgctgcaccagcgtatgggactgatactgagtgatcacgccgatacggcgaatcccggagttcagacaattagataaggcgaaatcgatgatgcggaacttcccaccaaagtggacggctggtttggcgcgtttgttcgttaaatcttttagacgcgtgccgcggccgccggccaggattagggcaacagatttcaatggcagctggcgcgccaacattacacgatcgttcttctctaaactcaccatgattaactccttttttatcctctctggaacacacacagtccatgcgcaggtccctgccagaccgccgttatcaccggattatcctctccagcgaatgggggaacggcgcgccattccccttcgggtaaaactatatctgtcacctcaagcgtggcatttatcgcaatcagaaaacggtccgacaacagaatttgcatcagcttaggcccgttttgccactcatccgcactcaagggttgcgcgtttttattcagccaacgcacgttgccatcgccttcttcccaccagctattgccggttaaagccggtatctgctgacgcaaacgaatcagcgcggcggtaaacgtggttaacccacgatttgcctgctgccagtccagccaggttaaggcattatcctgacagtaggcgttattgttgccatgctggctatggccgtgttcatcgcctgccagcagcatcggcgttccctgagagagcagtagcgtcgccagcagggcatgaatgctgtcgcgccgccgctccattaaatcaagcggaccgcctaatccttctttaccatgattgtcgctgtaattgctgttggtgccgtcgcgattttcctcaccgttcgcctcattgtgtttctgattgaaacagacgcagtcccggagcgtaaaaccgtcatgcgccgtgagcagattgacagaggcgccgggcgcgcggccattgcgtttaaacacatcgctggaagcggcgaaacgacaggcaaactccccggtcgtcaggttacgcggcaaccagaatcggcgggccgcatcgcgaaaatgatcgttccactcggcaaacggtggcggaaaattcccgacctgatagccgccctcgccaatatcccacggttcagcaatcagcttgaccgttgataacacaggacacgctttaatcgcggcaaacagcggcgcatcctggcgaaacgtcggcgtgcgccccatgacggacgccaaatcaaaacgaaaaccatcgacatgacaggtttccacccaatagcgcaaacactcgcacgcgtattccaccacgccgggatggcttaaattgagcgtgttgccgcaccccgtccagttgtgataatcgccatcgtcccttatccaataatagctacggttatcaattccgcgcagggagaaggttggaccgtccagatccagctcggcgctatggtttaatacgatgtccagaatgacctcaatccccgcacgatgcagcgctttcaccgcatcgcgaaactcgtccagcgccgtctcgggcgaactggcccaggcgggatgcagcgcgaacatcgccatcgggttataaccccaataattggtcagccccatacgttgcaggcgcggctcgctggcaaactgcgccaccggcaacagttccagcgccgtaatgccaagctgtttgaagtacgccaccatgaccggatgaccgagcgctttataggtaccgcgtatctcctgggggagctccggatgcaggtaggtaagccctttgacatgcgcttcatagatgaccgtttttccccacggcgtgcgcggcgcggcgtcatcttcccagtcataatggtcgctgattaccacgcttttcggcgccaccgccgcgttatcgcggtagtccggttcatcgtgtccgccgtgcaacagcggatgatcttttagttcgccctcgacccggcgcgcataaggatcaagcagtaacttcgccggattaaaccgatgcccctgcgctggctgccacgggccatgtacgcgatagccatagcgcaaacctggcctggcgccggccagataaccatgccagacatcgccgcgacgtcctggcaggtcatagcgacgctcattccctcgggaatcaaaaacgcacagctctacgcgctccgcatgggcggaaaagagcgtgaaattcacgccatgaccgtcatacgttgcgccatgcggcgttgcttcgccgatcgcaagctgcgtcattccccctcccgcatcagccagatcgtcgccaacggcggtaacgtcaggttaagagagtgctgacggccatggctttcgatctcatcgctgtgcaccacgccgccattgccggtgttgctaccgtgataatgcatcgaatcagtattgagaatttcacgccagcgtcccggctggttgatgccaaagcggtagtcgtggcgaggaacgggcgtaaagttgctggcgacgatgatctcgttaccggctttatcacggcgtacaaaaatcagtaccgagcgttcattgtcatcgaccaccagccactcaaagccgtaagcatcaaaatccagctcatgcaacgctttatggtggcgataggtgtggttgagatcgcgcaccagacgctgaaccccgtggtgccagttatcgcccccctccagcaggtgccagtcgaggctggcgtcatggttccactcgcgtccctgggcaaactcattccccataaacagcagtttcttgccggggaaggcccacatccaaccataataggcgcgcaggttggcgaatttttgccacgcatcgcccggcatacgatcgagaatggatttcttgccgtgaaccacctcatcgtgcgacagcggcagaacaaagttttcggtatggttgtacaacataccaaaggtcagcttgtcgtgatgatactggcggtacaccgggtccagcttcatgtagtccagcgtgtcgtgcatccagcccagattccacttgtaccagaaccccagcccacccgtttccggtggacgcgtcacgccagagaagtctgtcgactcttccgccatgctgaccgcgccgggcacctgctcgccaataatgcggttggtattacgcagaaactcaatggcttccaggttttcacgaccgccgaactcgttcggtatccactcgccctctttgcggctgtagtcgcggtagatcatagaggccaccgcatcgacacgcagcgcatcaatcccaaaacgctccatccagtacagggcgttacccaccagataattactgacttcacgacgaccatagttgtagatcagcgtattccagtcctggtgatagccctcgcgcgggtcgctgtgctcatagaggtgggtgccgtcaaactccgcgaggctaaattcatcggacgggaaatggcccggcacccagtcgagaatgacgttaaggcccgccgcatgggccgcattgatgaaataacggaagtcgtctcgcgtaccaaagcggcgggtcggcgcgtagaggccggtcggctggtagccccaactgccgtcaaacggatgttcgttgaccggcaagagttcaaggtgagtaaagcccatccatttggcgtaaggcacaagctgatccgccagctcacgatagctcagccagaaattgttatccgtatggcggcgccatgaacctaaatgcacctcataaatcgagatcggcgcatcaaactgattggctttttgtcgttcttcgcctggcgtcactttctccggcagtccgcaaatcatcgacgccgtttccggacgcatctgcgcctcaaaagcatagggatcggctttaatgcgcagattaccgttcgcatcaagcagctcgaatttatacagttgtccattatgcgcgccggggataaacagctcccaaataccgctctctttgcgcagacgcatcgggtggcgacgcccatcccaatagttgaattgcccgacaaccgaaacgcgacgagcattaggcgcccagacggagaaacgggtgccggtgacgccatccatcgtatcggcgtgcgcgcccagcgtttcataaggacgcaggtgggtgccttccgacaatagccaggcatccatttcctgtattaatggaccaaaacggtaaggatcgtcgatgaggttctgctgtccgtgccaggtcacggcgagctgatagcgaaagaaatttttacgtcggggtaaaacgccgcagaaaaaaccgcgagcgtcgagacattccagtttgccgactttacgtccggttttgggctcaatcacccatacgtcggtggcgtcaggtaagagggcgcggacttctagtccggcttgggtctggtgcattccgagtacggaaaaagggtccgcaaaatgtcctgcaattagcgcattaatcacgtctctatcgatacgactggacatggtttgtcatcctgttttgtggcgtcactccatctcactgaattcaacatcaggtagtgacacttctttgacctgaacggcgcagcacactgtgcatcctatctgcgtcgtcctaccttcaggttaggcttaatacccgtgggattaagctacccttaaagaatagccaatgctctgcttaactcctgataaaaatgaaacatctgcgtttactcctgtattacgcaaaaaaagggtgacgatgcacccctggtttaacacaaatttccccgccggatggcggcgctgacgcgccttatccggcctacagaaccacacgcaggcccgataagcgctgcaatagccactacgccaactggcgcagcattcgacgcagcggctcggcggcgccccataacaactggtcgcctacggtaaacgccgacaagaactctggccccatgttcagcttacgcagacgaccaaccggcgtagtcaacgtgccggtcaccgccgccggggttaattcgcgcatagtgatatcacgatcgttcggcaccactttcgcccacggattatgtgccgccagcagttcttccaccgtcggaatggatacctcttttttcagcttgatggtgaacgcctggctgtgacagcgcagcgcgccgacgcgcacacacaaaccatcaaccggaatcacagaggcagtattgagaatcttgttggtttccgcctggcctttccactcttcgcggctctggccgttatcgagctgtttgtcgatccaggggatcaggcttcccgccagcggtacgccaaagttatcaaccggcagctcgccgctgcgggtcaatgccgtaactttgcgttcaatatcaagaattgcggaagacggcgtcgccagttcatcggcgacatggccatacaactgacccatctgggttaacagctcgcgcatatggcgcgcgccgccgccggaggcggcctgataggtcgcgacggatacccagtcaacgagattatgggcaaagagaccgcccagcgacatcaacatcaggctaacggtacagttaccgcccacaaaggtcttcacgccattgttcaggccgtcggtaatcacgtcctggttgaccgggtcgagaataataatggcatcatctttcatgcgcagcgtagaagccgcatcaatccagtaaccctgccatccgctttcgcgcagctttggataaatttcgttggtataatcgccgccctggcaggtcacgatgatatcgagcgcttttagcgcatccagatcaaaagcgtcctgtagcgtgccggtggaggtgtcgccgaaggtgggcgccgcctgtccaaactgggaggtagaaaagaaaacagggcgaatagcgtcgaaatcgcgctcctctaccatgcgttgcatgagaacagagccgaccattccgcgccagccgataaaaccaacatttttcatagcgtttttttcctgcaaagagatgtgctgtgtatgcgcgccagtatcctgtggcgcatccttcaccatacaaaaagcagccaaagtcgcaagtgaaattaatcaatgatagcgaagccatcagtaatgcgacttatcctgccttaccgcgcaagcagaaagtccagtggcgattatcagggaatttgcgttaggaagggaatcatttccgtcgctgttttattgatcctaattatggatcagcgtagaaatttgcctgcttttatgcgcgtactgaaacatggcgaggcaaaatgtcgttgggcgattgccatgcacacctcaataaaaaaaccgggtagcgattacgccttacccggcttacggtgtcgatatgtgcccgtttccaggcccggtaagcaccgcgccaccgggcaacaagactcagctcagcagttggaaagcaatcatcccgacaatcgcgccgaccgtaccgaggatagtttccatcatcgtccaggtttttaacgtctgcgcttcggtcgcgccggtaaatttaccgaacagccagaagccagcgtcgttaacatgagaaaccacaattgaaccgccggcgatacagatagagagcgcagccatctgcgcgccggagaaattcagttgctctatgaccggcatcaccagaccgaccgcggttaaacacgccacggtcgcggaaccctgaatgatgcgcactgccgccgccagcacaaagcaggtaatggcaatcggcagtcccataccggttaacgcttcgcccagcgccgggccgacgccggagtcaaccagtacctgtttgaacaccccgcctgcgccaatcaccagcaggataatgcccgccggttgcagcgcgtggccacagatttccatcactttgtctttcggcatcccctgacgcatcgccaggccataaatcgctaccagacaagcgaccagaatcgcagtgaaggggtgaccgataaactcaaaccattcgtaagcggtggaaccttccggcacaaaacgcgcggcgatcgttttcagccctaccagcaccaacggcagcaggatcagcgacaggctgaagccgaaagaaggcattttgccttcgcccagatgcggctcggtaatgtcttccggtacatgcagttcaacgtaacggctgatgaaattgccccacagcggcccggcgataatcatgcccggaatggctgcgcacaggccaatcaggatcatccagccaaagtcagcgtgcatttgggatgccagcagcatcggcgcaggtcccggcagcaggaacgctgcggcagccgccacgcccgcaaacagcggaatgaccagcttcaccaggttcgttccggtgtggcgcgccattgagaacgccacgcttatcagcagcacaatcgccacttcaaagaacagcggtagcgcgcaaatcagaccggccaggccaatggcataatgcgcgcggctatgaccgaaagatttcagcatcttgacggcaatctgatcgaccgcgccggtctcgtgcagaatcttgccgaacatcgcccccagcgcgaccacaatcgccaggaatcccagcgtgccgcccatccctttttccatggtcgcggcgattttatcaagcggcatccctgaaaaaagccccgcgcccatcgagacgaccattaacgcgacgaaggcgtgcatacgcgccttcatcaccaaaaacagcagcagtaagacggaaccgacggcggttaaaaccagtgttaatgtactcacagcgtactgcctttattgatgacctcaatggtgctcgccacgacgccttccagcggctggtcgatatccaccaccagaacatcgcgttcgtcggcacccggctcttgcagcgtttcaaactgcgtcaccagcatttgggttttgaagaaatgacctttgcgcgctttcagacggctttcaatgacgtcgaaatcacctttcaggtagataaaggagaggttcgggtttccctcgcgcagcaggtcgcgatagtgttttttcagtgcggagcagacgatcagcgagattttattggtacgctgcatcgcgaaagcggcgtcgttcagcgcctgtaaccacggtttgcggtcatcatcattcaacggctcgccggaagccattttttcaatattgcagcgcggatgcagaaaatcgccgtccagaaacgcggcatgaagctgatgcgccacggcgcttgcgacagcggatttaccgctgcctgatacgcccatcagaacgtaaacgtggtgatcatgattagtcgtgctcaaagcgggcccccactctacaagttgcaaaatttgttacgggtaactgttatcggtaacattgtccaaccgcaccattcacgacgcaatgaccattcgtgccaaaagtgaataagtgtgagctacttcaaagttgtcagactaaatagatccgcccggtgacaaggtgaaacctaaatctaacattttcggcgtgaccgtttcgccgcgaatgcgggccaacagacgttccgcgccaatgctgcccattcgctcgcgtggcgtcaggacgcttgccagacgcggttccatcacctggccgatgtcatgaccgtggaacccggcgatcgccatgtcgtccgggatttttagccccaggcgctggcattcgaaggccgcccccaccgccaggtcatcgttggtgcaaaaaataccgtcaagctgtgggtattcgcgtcgcgcctggcgcatgagttcgataccggaagagtaggatgaagattgctccatcatcacactgtaaggaaccagccctgcgtcccgcatcgcctgttcatagcccttctgcttgatgatagtacgttcgtcgaggcgcgcccccagataggcgatatgacgatgaccacgcgcgataatcgcggcggtcatctgacgggcggcctcgaagttatcaaaaccgacggcaatatcgagacacggcgactggctgtccatcagttccaccaccggaatcccggcgacttcgatcatttttaaggtgcgcggcgtatgggtacgctcagtgaggatcaggccgtcgatattccaggagagcatcgattccaggcgctcctgctccatctccggtttatagccgtagtgcgccagcatggtttgataaccatgcgcgtcggtgacagcctcaatgccgcgtaacacttccgcaaagacctggttggttaaagacggcagcagaacgccaatggcgcgactggtggcgttggaaagaatgtcaggcgcgcgattaggaatgtacccgagctcatcaagcgcagccgcaattttaccccgcagcgcgacggagacctgctccggattacgcaaaaaacggctgaccgtcattttggtcacgcccacacggtcggccacatcctgaagtacgggtcttttctttttcatcgtcctgaaaggtataaaagggatagatttgcccagtttaccacggacatgcggaattaatgacaaacgatgaaaagccggatggcaacgctttcgcgtcttatccggcctacaaaaggttacagcacgttaaactggcggcaagtcaaacagcaacacttcactgtcgctgtcggcatgaatcgagattgcctgctcatcccaaatcgccaggccgtcgctggtggtggctttggtgccgttaatggtcacgttaccttttaccacctggatccagacgcggcgctcagcggcaatctgatgcaccgactgctcatctttgagcagcgcccagcggtacagctccatatcctggtggaccttcagcgaaccatcgcgagcatctggcgaaagcaccagttgcttgccctgcgcggcgtcgaagcggcgctgttcgtagcgcggcgtgatgccggtttcttgcggaatgatccagatctggtacagccgcagacgatccgttttgctcgggttgtactcggagtggcgaacgccggtcccggcgctcataatctggaattcaccggccggaacctgttctttattgcccatactgtcctggtgttctacggcgccttccagtacataggtcaaaatttccatgtctttatgcggatgcgtgccgaaaccctggcctgcgtcgatcacatcgtcgttaatcacacgcagcgccgagaaccccataaagttcggatcgtaataatcggcaaaagaaaaggtatgccaggagtcaagccagccatgattcgcatgaccgcggtcgtttgctttgcgtaagtagatcattgtgttcacccccagatgttttcgatggaataagtgtggactcattccgtccgggatcatagagggtgaaaattgactcctctgttcaaaaaatatgaataagcgcagaggagtctgtaagggctatttagccagggttatcgtcgcaggcgttgcctgttcgaaggcacgttcgaggatttccaggttggtaagaacttcagattccttgacgtaattaggcgtaccgacggtcaacgtctggtacagcgcatcatagacgcgaccatagtcacccgtttccggtttcacctcttctttcaccgtaacgccgtcgtcattgacatactccagcacgccgacggattcgtcagcggcgaaaccgggttcaccaggcataatgttcgctttcaggctggtttcttgttgatcgataccgtatttcacaaacgaacctttggtgccgtgaacaataaacttcggatagtcgattttcaccagatggctggttttcacaatggctttcaggtcaccgtagaacaattgcgcttcaaaggtgtcatccggattcgctttattacgcaggctacgaatgtcatacgcgacatgatccgggcggccaaatagcgaaataatttgatccatagtgtggacgccaagtccgtagaaagcgccatcctgcggcaggcccggtttggtttccgccacgggtcggtagtagtcaaaatggctttcaacttcgacaatcttgcccagtttcccgctctcaatcgcttttttagcagtgagaaaacaggaatcaaaacgccgattctgatacggcgtgacggtcagtcctttgcttcgcgccaggtcgaacaacacttttgcctccgccagcgtcggcgtgaaaggtttctcaaccagcacatttttacccgcttccagcgcgcgtttagcgtattcgaaatggctgtcagcatgcgtacagacgatcaccagttttacctgcggatcgcccaacacctcatccagatcgctggtgaagtgaatatgcgaatactgcggcgcctgctcttccggtttagcgtgacgacggaaaatatgcgcgacatgccaggtatctttccgattcagaacataggggagatggtaacgggtggtacttttgccgaatccaataaatgcgcagtgtaaggtcatgagacgatccttttgaagatgattgtctacaccatagcgtaaagcgtgaggagactgaatgttggattctttgccggatgcggcgttgcctttttgggcctacaaaagcagatgcctcaagatcggccgtcggcgtcgcggtcagtttgttcacggcaagcgcgcagggcccggagcgtactaaatgtacgtgaggagcacgagcacttcccggggacaaaatgacaagtaagccaggctgaaacaaaacccaaaaaaaaagccagcaaaagctggccaaaataatactggaagcaatgtgagcaatgtcgtgctttcaggttctccgtaggggttcccctgaatgcaaggcaataataatcattctcattcgcagttgtctacttctttttgcaaaaaaaatgcggttgacggaattttctttctcagcgagtgtaaatacacaattaaccctgcaggagataaggaatgagtgaaatagtgatacgccacgctgaaccgaaagattacgatgccattcgtcagatccacgcccagccggaggtgtaccacaacatgctacaggttcctcatccttccctcgaaatgtggcaggcgcggctaaccgagcaagccggggttaaacaactggttgcctgcattgacgatattgtcgttggccatctttctattcaggtcacccaacgtcctcgccgcagccacgtggccgattttggcatctgcgtggatgcccggtggcacaatcgcggcattgccagcgcgctgatccgcacgatgatcgacatgtgcgacaactggctgcgcgttgaccgtattgagttaacggtgtttgttgataacgagcccgccgtggcggtgtataagaagtacggctttgaaatcgaaggcaccggtaagaaatacggcctgcgcaacggtgagtacgttgatgcgtactttatggcgcgcgtgaaataacgcttccccgccccaccctgtggggcgaaacgtcacaaaccttcacaacattccagttattgcaacctacttcccctatatcaaaacaataaccatctgaatttcatggttattaccactttaagctttatcaccgttttttccgtaattttagcaatattaatattacatttttgtttttttttggtttctgccatcactttatggtgacaatcacaacaatatactcctcccgggactaatttaaccacggtgaggtaaaaaatgaaatttgaacgccatcatagaatattgaaggaactcagtatttcgggagttgtaaaagtttcaaatctggcgaaaagtctcaaggtaacaaaggaaactattcgttcagatctcaatgaacttgccggacagggatatcttactcgctgtcatggtggtgcatttattacccttgattctcttgataacgtcgcaaaaaatgaaattgcttatgtgctggaaaaatatgaatcagcgcagaaaataaaaaaaggtctctctgccatgaaaaataatgtatgtgttattggctcgttcaatgttgatattatcagttatctaccgagattaccctcaacgggagaatcattgctggccgataaatttattttttcacccggcggtaagggatgtaatcaggcattagcagcaagctatgccgattctgatgtgcattttattactaaagtcggctcagatcattttagtgattacgccattaattttataaactcatcaaaaatccataaaagtgttatctaccagaccaaagaaacacaaacaggtacagcaaccatcatggtgaatggagataccggagataacgtcatcgctatctaccctggcgccaacatgacaatttcccctgatgaaatcaccattcagaaagaagccattgttcattcagatattgttcttgtccaactggagacgaattacgaagcgctgcagcaaacaattcgtctcgcacaaaaaaatgacataccggtcatcatcaatccagcgccgtacaatgacatggttaacaccatcattgataacattgattatattacgccaaatgaaacggaagcaggcctgctggccaatatggcggttaatgatatcgaatcagccaaatgcgcggccaaaattattcatcagaaaggcgtcaaaaataccattattacattaggtagcaaaggttcgcttgcttatgatggcacacaattcatctattccccggcatttccggcagttgtaaaaaatacggcgggagcgggtgacgctttcaatggtgccctcgcatctggtcttgcaaaaggaaagtcactggcatccgcattgtgctacgccagcgcatttgcctcacttgcggttgaaacgcctaatgcctctgatatgccggaaaacgactccgttcttcatcgtattcagggttcacattacaaacaaactatctctactcactaaatcaaggagcagactatgaacaatacgcagaaaaaactaaaggtgctctttattggagaatcctggcatattcatatgattcattcaaaaggttatgacagtttcacctccagtaaatatgaagaaggcgctacatggttactggaatgcttgaggaaaggcggcgttgatattgattacatgcctgcccacacggtacaaattgcctttccagagagtattgacgaattaaaccgttacgatgttattgttattagcgacattggtagtaataccttcctgttgcaaaacgagacattttatcagctaaaaataaaaccaaacgctctggagtccattaaagagtacgtcaaaaatggcggtggactactcatgattggtggctatctgtcgttcatgggtattgaggcaaaagccaattataagaacaccgttcttgctgaggttctgccagttattatgcttgatggcgatgaccgggtagaaaagcccgagggtatctgtgctgaggctgtctcacctgaacatcctgttgttaacgggttctcagattatccggtatttcttggatataaccaggccgtcgccagagacgatgccgatgtcgtattaacaataaataatgacccattgttagtgttcggtgaataccaacagggtaaaaccgcctgctttatgagtgactgctccccacactggggaacccagcagtttatgtcatggccgttttataccgacctgtgggtcaacacgcttcaattcatcgccagaaaataaaaaacaatggagtaacgaaagttactccttttataaaatataaggattgatgtatgaacaagaataagtactcaacccccttactgatgcttgccaccatcttagccggtatgctttccccgatgcagtctgccgttaatgggcagttaggacattggttacaagacggtaatgcttgcgcagtaatctcgtttgccagcggtctggtcgtcatgttttttattattattgcgcgcaaagaaacacgccagcaattcgcctcaatccctactctgattaaaaagagaaaaatcccgctatggaattggtttgcaggattatgcggggcgatggtcgtattttctgaaggcgcatccgccagcgcgctgggcgttgccacctttcaaacggcattaatttccgccctgctcctttccggactgctgtgcgaccgttttggcatcggtgtggaggagaagaaatattttacgccatggcgcattactggcgcattgttcgccgttatcgccaccatttttgtcgtgtcgccacagtggcactcaacctcgtttatcctgctcgctatcctcccctttttggcagggttactcgctggctggcagcctgcggggaatgcgaaagtcgccgaggcaacgggctccatgctggtgtccattacatggaacttcatcgtcggcttttgtgtcctgggcgcggcgctggcgatacgtatcgcattaggccatgtcaccatccagttacccgatacatggtggatgtatctcggtggtccgctgggtctgctgtccatcgggctaatggcgattctggtgagaggcttagggctattgatgctgggcgtagcgtcaacagcaggccaactgcttggctcagtgctaattgatgaattgatcccttcattaggcaatacggtctacctggtcaccatcatcggtacgctgttcgcgttagtcggtgcgattgtgaccaccatccctgaatacagagcatccaaaatggcgcaaagaatagaggtgtcagaatgaaaggtttcctgcaaaccgtaacaggcccggtggcgcatacggatatggggctgacgctaccgcatgaacatctgtttaacgatctgtcttcggtcgtagacgagccacattatgctttttcacagcaactggtgggaaagaaagtcagtgctgacctgcagtggggactgaaacacgacccatactgctgcgccgataacatggaccgcaaagagattgatgatgttatcttcgaaatcaataactttatgtctttgggcggcaggacgattgtcgacgccaccggatcagaatccattggacgggacgcctcagcgctgcgagaagttgccttaaaaacgggtttgaatatcgttgcgtcatccggaccttatctggagaaatttgaaagtacccggatccataaacctgttgagctgttagcctcactcattgataaagaactgaatcagggtattggcgagacggatattcgcgctggcatgatcggtgaaatcggcgtatcccccgcgtttacccaagcggagcgtaacagcctgcgggcagcgtctctggcacaatgtaacaacccccacacggcaatgaatatccatatgccggggtggctgcggctgggggatgaggtgctggatatcgtgctggaagaaatgaacgtctctccggcaaaagtctcgctggcgcattcggacccttcaggaaaagatgtcgtctatcaacgtaaaatgctcgaccgtggcgtatggcttgaatttgacatgattggtctggacatcaccttcccaaaagaaggtgtcgcgccgggcgttcaggagaccgcagatgcagtagcgaatctgattgcactgggttacgccgaccaaatcgttttaagccatgatgtttttctcaaacagatgtgggcgaaaaatggcggaaatggctgggggtttgtcccgaatgtcttcctcgcctatctggctgctcgcggagtagacaacgatactctgcgcaagctttgtattgataatccagcccgattactcacggcataatctgcaaatagcccggtgtctgacaccgggcctggaattaaaaatcagtatcccgccgttaaatcatccaccgaacgcgggtcggaagcgccatacagttcaccatccggtccaaccataatactttgggtgctgcccatcgcttctttcagcgccactttctgccctttctgttccagcaactttagcgtatcggggctgaagcccttttctacccgcagttcgtccggcaaccattgatgatggaaacgcggcgcgttggtcgcttcggcgacgttcatgccaaaatcaatgctattcactaccatttgcagcacagtagtgatgattcgactcccgccagggctgccggtcaccagccaggttttgccctctttaacgacgatagtgggcgacatcgacgacagcggacgcttcttcggaccgaccgcgttagcatcgccgcccaccaggccataaacattaggtacaccgggtttagcagaaaaatcatccatttgattattcagcagaataccggtatttcccgccacaattcctgtgccgaaggtggtgttcagggtataggtcaccgccacagcattgccgtctttatccaccaccgagaagtgggtggtctggttgctttcatacggggcgagcttgcccggttttatctggctggaaggtttggccttgttgatatcaatttgatcggccagcgttttcgcataggctttgtgggtcagcgcctgccacggcactttcacaaagtccggatcgcccagatactctgagcggtcagcgtaggcgtatttttccgcttccgccatgatttgcatggcatcggcgctgccaaagccgtacttcttcatgtcgaaattttcaagaatattaaggatctgtacgatgtgaataccgcccgaggatggcggcggcatggagaagacctgatacccgcgatagtcaccgctgattggcgtacgctcaacggctttatagttggctaaatcctctttggtcatcagaccgccgttcttctgcatttctccggctatttggtcagcaatcgcccctttataaaacgcatccgggccgttttcggcaatcatttccaggcttttcgccagattcttctggaccagcttatcgccttttttcagcggctcgccgtctttccagaaaatggctttgctgttctcatggttgaggatcacttcgctgccgtaagtttttaagtcgttggccagcgcatcgttaaccacaaaaccctcttccgccagcttcatcgccggacgcaccactttattcagcggcatcgtgccgtatttctccagcgccagcgagaaccccgccacggtacccggcgtaccggatgccagatgcgacgtcagcgactttttcgcatcggcgttaccctgatcgtcgaggaacatatcacgggtcgcgccagcaggcgccatttcacgaaaatcgatcgccgtggtagcgccatctttagtgcgcagcagcataaatcccccgccgcccagatttccggcttgcggatgcgtgacagccagcgcatagcccacggcgacggcggcatccacggcattaccgccctgctttaagatatccacgccaacctgcgtcgccattgcatccaccgaggccaccatcccttgcgtcgcccgcacaggatgaaagacatcttcttcaacaccataggagactggcggcgcgacgggaggattggccaccgcgctaaacgtccccccggccagcagagcggcgatcgccacccagcgcataaacgttggtttcatcgttgtttttctccagataaatgggtgtatgtcccgtttaatcctggcccacaacgcttaaaaaatcatcatcatggcgaaatagaggtacacttaaaaagaggcctcatcgggaggagacgacaatgaaacgcttactacttattacggctttgttaccctttgctgtattggcccagccaattaacactatgaataatcctaatcagccaggttatcagatccccagccagcagcgtatgcagacgcagatgcaaacgcagcagattcagcagcagggtatgttgaaacaacagatgcaaacgcaggcgcgcagccagcagcaaaatctacagtcgcagttgaatgccaatacgcagcgggttcagcagggacagccgggcaacggtatgctcggtcagcaaacgctgcccaatacgcagggcggaatgctcagcggcagtggaaatccggaccggatgctaaaccattcccagccaatgttgcagcaggacagcgggacgccgcagcctgacatcccgctgaaaaccatcagcccttaaaactgacggcccttaaaactgaaagtgagggccgatgtcatcaatgcgatcggtgcagatacaatccacgccccagcgcagcagctctgccgcccgctggggctgattgacggtatacaccagaatccgcagacccgcggctttaatctcttgcactcgcgtctcatcgagtaatttatggttgagatggagggaaacacagcccagacgggtcgtcagttcacgccagtcttcacgccatttatccagcagtaacccgcgcggcagttcaggtgctgccgcctgcgccgcttccagcgcctctatctcaaaggaagaaagcagcggcggcgtcatcccggcccacagttcgcgggcggccaacgccacgacgcgtcctgttagccttccgctccccgttgtcggtttgatctcaatatttgccatcatgccgtgtttacggcagcgctccgccacctgcgagagcagcggcagcggctcgcctttaaattcgccgctaaaccaaccgccagcgtccacacgcaataaatcctgccagttcaactcgcccgccacgccccaaccattgctggtgcgctccaggttatcgtcatgcagcaggaaaatttcgccgtctttcgacagcttggcatcaaactcaatcatggtgtgcccgtatcgcgcgcccacgtcaatcgccgccagagtgttttccggcgccagtttaccgccgccgcgatgggcgacaatgtggggataaggccagttactcatacacgttgtcctgtttcgccatcaaaaagatgtcgctgatgttccggcagatgcagccatagcgtactgcccgccgccgggcgctgctgatgcgccaaccgcaccaccagtttctgatcgccccagcgcccatgcgccagattatccgcgcccagaatctccagcgtatctaccgttagcggcacgccgccttccgcctgcgagcttaacgcaatatgctccggtcggatacccagcgtcatgttacgtccggcatgaccccgatagtccgcacctatcggtaacgccagaccgccaggcaattcgaaacggtcgccggaagcgctgataacgccatccaacaggttcatcgccgggctgccgataaagctcgccacgaagcgactggccggtttttcatatacctctaccggcgtgccaatctgttctgcgacgcctttattcatcaccatcacccgctgggccagcgtcatcgcctctacctgatcgtgagtaacatagagcgaggtggtacgaagacgacgatgcagatgttgtaactccagacgcatctgcacgcgcagcttggcgtcgaggttagagagcggttcgtcgaataaaaagactgccggctcgcggacgatcgcgcgccccattgccacgcgctgccgttgaccgccggaaagctcgcgtggacggcgtttaagcaggccgtccagctccagaatgcgcgccgcctcccgcacacgttcttcaatatgcgctttgctcataccacgaatttttagtccccacgccatgttctcctctacgctcatatggggatagagagcatagttctgaaataccatcgcgatgccgcgatctttgggctccatctcggtgacccgtttgcgatcaatccagatatcgccgctggtcacgcgttccagaccagccaccatccgcaacaacgttgatttgccgcagccggacggcccgaccatcacgataaattcgccatccgccacgtccagcgtcagcggttgaatgacctgggttttgccgtcccagcttttggttactgcctgtagttttaaaccagccattttatttctcactatcgaccaggccacgcacaaacgcgcgctgcatggctaacacaattacgaccggagggataagggtgagcagcattgccgccatcacctggttccattgcgtggtaccttcgccggtggcgatcatccctttgatacccgctacggcagtgccaagattcacgtcggtgataatcaacagcggccacagatactggttccagccgtagataaaggtgatgacgaataacgccgccaggttggtttttgacagcggcaacacgatgtcgcggaaaaagcgcatcggcgacgcgccgtcaatacgggccgcctccaccagttcatccggaagcgtcatgaagaactgacgaaacaggaaagtggcggtagcggacgccatcagcggtagcgtcagaccagcatagctgtcgagcattttcaggttggcgatcacttctaccgtcgggaagatacgcacttcaaccggcagcatcagggtgataaaaatcatccagaagaacaggttacgcaggggaaaacgaaaccagacgatggcgaatgcggaaagcatagataccgtgattttgcctaccgtaatgctgaacgccataatgaaactgttaagcatcatcagccagaatggcgcgctattaacaccgacgccgttgacccaaatagttttgatattctccagtaactgcgtgccgggaagcagcgtcatcggcgtctcaaacaccgcacggtcgtccagcgtcgccgcgacaaacgcgacatacagcggaaacaaaatgaccgcgatccccagaatcagcatggtatggctgaatattgtcagcccgcgacgattctctatcattggtaacgcaccttactttccacatagcggaactgcaccaccgtcagaatgatgacgaggaacatcaacactaccgactgcgcggcggacgccgagagatccaggccggtaaacccttcgcgataaatcttataaatcagcgtcgtagtggcttgtaccggcccgccggcggtcgcggcgtcgatcaccgggaaggtgtcgaaaaaggcgtacaccaggttgaccaccagcaggaagaaactgaccggcgcaataagcggcaaagaaagccggaagaaacgacgaatcggcccggcgccgtcaatggccgccgcttccaccagcgagcggggaatggattgcagcgcggcaaagaagaataaaaagttgtaactaatctgcttccagactgacgcaaataccaccaggaacatcgcctgaccgctgttttgcgcgtggttccagtcatagccgaattcgccaaggaaatgggtgattaatccccgccccgggttaaacaggaaaatccacaatacggcggcgacggcgggcgcgacggcataaggcagcagcatcagcgtctgataaaaacggctgccgcgcaccacgtaatccaccagggcggcgaaaaacagcgagaccagcaggccgctaaacgtgaccagcgcgctgaatttaatcgtcgtccagaaggcgtcgagataataactgtcgtgaaaaagcgcgacgaaattctccagcccgacaaattggctggaaaaaccaaacggatcgacgctttgcagcgaataccacagcgcttcgcccgcaggccagataaagaaaataacggtgataaccaactgcggggcaaccagtaaatacggcagccagcgcgagcggaacaccggacgggatgatgacatgaaggttcttttcctggaaggtgccggatggcggtgcatgcaccttatccggcacttatacacttaagatttgctcgctttctcaaaacgacgcagcaactgattcccgcgatccactgcggtatccaacgcctgttgtggggttttcttcccggtccagacgctttccagctcttcgtccacgatggtacgaatctgcggcatattgcccagacgcaagcctttggtgaagggtaacggcggcttattcaacatctggcgagtggcgatatccgcaccggggtttttatcgtaataaccctgctcgcgggtcagctcgtaggcggcggtggtaatcggcaggtagccggttttttgatgccattcagcagcgttttccggttttgccaggaagtcgaggaatttggcgacgccggtataggtttctttatctttaccctgcatgacccataggctggctccgccgataatggcgttttgcggcgcgcccttgatatcagcgtcgtacggcatcatacccacgccatagttaaatttggcatactggcggatattggcgagcgagccggaggacgcggttgtcatcgcgcagtcaccgttataaaacttctcggtagactcgtccttacgcccaacatagctaaaatcgcctttcttattcatctcttccagcagcgcgatatgtttcacctgctctggcttattaaactccagcaccgcatctgtaccgtcaaagccattgtttttactggcgaaggggagaccgttccaggcgctgaagttttccagttggatccagccttgccagccgctggcgtaaccgcatttcatgcctgccgctctcaatttcgcggtatagtcagccagctcctgccaggttttcggcggctgctccggatctaaaccggctttcttaaaggcgtctttgttgtagtacagtaccggcgtggagctgttaaagggctgggagagcagatgcccgcttttagcatcggtgtagtagcctgcaacggtcggtacaaactgggactcgtcaaagttaataccggcgtctttaaacacttcataaaccggcttaatggctttcgaggccatcatggtcgccgtcccaacctcataaacctgcaatattgccggcgcgttgccggtacggaatgccgcgatcccggcgctcaggttctgttcatagttccccttatagaccggaacgattttgtaatccggattggcctggttgaaacgttgcgccagtgaatcaacttctttgcctaactccccttccattgaatgccagaatggaatagtggtgacggccaacgcctgacccgtaaatgccagactcagcgccagtcctaaagctgtatgtcgtaacgatatcatcggttatctctctttttgtgccgggatgcgcgatatcacgcgttttatgttcgcgggggtaacatgacatgctcgaatgacagaaaaataacttttttattacaaaaaaaagatagtaaggcgacagagagatggcaaggcagcgaaagcgccggaaaagaaaagtgggagctacggcacggataggtacgacattattctcgggggcggcgcacatgccgtaacccaaccaggcggagcgtcgccgggattaacgtctcaggcacgtaagcgaacggcaatttgctccagcgtaagccgccctgccgccgcatcgactgtcatatcgacaaaatccggattcgcagcgagtgagatcccgttacgctttaaaaacagcagcgtaataaataaggcggtacgtttgttaccatcattgaagatatgcccacgggatatagcgagcaaatgcattgccgccagcagccacacgtcggtcaccccttcatattcgatttgcttgagtacccggtacattagcgcttccgcgcggccaggatcaggcatgcctgttacaccaggcgtaacgcggagaagcctgtcgtgaaactgaattatctcttccgctgagataagttgtagggtcatttatccgccagctccctgagctcattgccatgaaccgccataatggcagcaaactcatcatccattcgcgccgtctgataacgctcaaactcctcggcgctgatgatcactgcggacttatgcccacgacgcgtgatggtaacaggcccccccgtcaccgcactttccaggacttcggccagattttgccgcgcttcgctatagttaaccgtacgcataaacatctccccagttgtacatgtttattgtacaacaaacatgtacaaaaaaagagccatcaggctcttttgaaaaattttaccgcttgccgttaccgggggcggcgcacgcgcttcccccctggcacagtctaaccgcccagataggcgctgcgcaccgcttcgttcgccagcagtgcatcaccggtatcggatagcaccacgtggccgttttccagcacataaccgcggtcggcgagcttcagcgcctggttggcgttctgctcgacaaggaagatggtcataccctgctcgcgcaactgctcaatggtgtcgaagatctgctggatgatgatcggcgccagccccagcgacggttcatccagcagcaatagcctcggctggctcatcagcgcgcggccaatcgccagcatctgctgttcgccgccggacatggtgcccgctcgctggatacggcgctcatgcaggcgcggaaacagctcgtacacccatttgatacgctcctgaaaccgatcgcgctcggcaaaaaaaccgcccatcgccaggttctcttctaccgtcatccgcgagaagacgcgccgcccttccggcactatcgccaccgcttcacgcatgattttcgccgtctgccagtcggttatgtctttaccgtcaaacaccacccgtccgctggaggcgcgcggatcgccgcacaaggtgccaagcagcgtcgttttccccgcgccgttagcgccaatcagggtaacgatttccccctggttgatgtgcagactgacgtcgtgcagcgcctgaatcttgccgtagtgggcgctgactttttcaaacgttaacatcgttttttccatcttatgcctcacccagataagcgcggatgacgtccgggttgttgcggatctcttccggcgtgccgttcgccagcggcgtgccctggttcaccacgtaaatgcgatcggaaatgcccatcaccagcttcatatcgtgttcaatcagcaagatagtggtgttgtgatggttacgtagttcggcaatcagctcatccagctctttggtctctttcgggttaaggccagccgccggttcgtcgagcatcagaatttctggctgcgtcaccatgcagcgggcaatctccagccggcgctggtcgccgtaggccagattactggcctggcggttggcatgttccagcaggccaatacgctcaagccaggtcgccgcgcggtccagcgcttcgctttgcgcgcggcggaaagcgggcgttttcaacaggccggaaaagaggcccgttttcagttgctggtgctgcgccaccagcagattttcaatcaccgtcatttcgcgaaacaggcgcacatgctggaaagtgcgtaccacgcccatgcgggcgatctgctggcccggcaatccttccagatgccgctcgcgcaacgtgatcgtaccgcctgtcggcttataaaaaccggtcaggcagttaaacaccgtcgttttacccgcgccgttagggccaatcagcgacacaatttcccgctcacgcaattccagcgatacattgttgaccgccagcaaaccgccaaagcgcatcatcaggccgttaaccgctaataatggctgactcatgcctgctctcctttcgcctgaccacttttcagcttcaactgcggacgcgtcatcggcagcaatccctgcgggcgccagatcatcatcaacaccatcaaaccgccgagcatcaacatgctgtattcgttgaagtcgcgcatcaactcgcgcgacaccaccagcagaaccgccgccaggatcaccgcaaactgcgagcccattccgcccagcaccacaatcgccagcacgaaggcggattcggcgaaagtgaaggattccgggctgacaaagccctggcgggcggcaaacaacgtcccggcgaaaccggcaaacgcggcgctgatagtaaaagcggtcagcttgatgcgcgtcgggcttaaacctaatgagcgacaggcgatctcatcttcacgcaacgcttcccacgcccggcccagcggcatacgcagcaggcggttaatgacaaacagcgacaggaccaccagcaacagggccaccagatagaggaaaatgacccggtcggatgggtcgtacttcacgccaaagaaattgctgaaggtatcccagccgccttcgcgggtgctgcggctaaactccagaccaaacagcgtcggtttcgggatctggctgatgccgttcgggccgccggtaatttcagtgttgttgagcagcaggatacggacgatttcgccgaagccgagcgtcacaatcgccagatagtcgccgcgcagacgcagtaccgggaagccgagcaggaaaccagcagcggcggagaccagtcccgccagcggcaggcaggtccagaaacccaaaccataatagtggttgagcagcgcaaaggtataagcgccgatggcgtaaaagccgccgtagcccaataccagcagaccggacagccccaccaccacgttcagccccagaccgaggatgatataaatcatggtcatggtggcgatatcgacgctaccgcgcgacaccataaacggccatgccacggcgataaccagcagcgccatcagaaacagcttttgcttaacggtagagccatcgatcgccggcagaataaacttcggtccggagacgtgcttcaccgctttctggaacatcggacgcagcaactgaaagaaaaaaaccactgccgtaccgataaagatccactgccagcggatgtcggcggcggtatccaccaccagtttggtgccgtccagctccagttgtacgcccatgaagacgccagccagaacgaagaacatcgccgcagagaacagagccatcgcaatatgcatcggtttcatactttctctacctccggacgccccaggataccggtcggcatcaccagcagtaccagaatcagcagagcgaacgatacgacatctttatattcggtacttaaatatgcagacgagagcgcttcggcgacgcccaaaatcagaccgccgatcatcgcgcccggaatgctgccaatcccgcccagcaccgccgcggtgaacgctttcatcccggccataaaaccgatgtaggggttaattacgccatagaactgaccgagcagcacgcccgccaccgccgccattgccgcgccgataacaaacgttagcgcaatgacgcggtcggtattaatgccgagcaggctggccattttcagatcctccgcgcaggcgcggcaggcgcggcccatccgggagtagcgaatgaaaatggtgagcgccagcatagccagaaaggtgactatccagataaccgcctgcatggtggtgatggacgcggaaaagttttcgctgctgcccacaatccactggccgttaaacaggctgggtaacgccacgtcgcgcgaaccttccgtcaggctgacgtagttttgcaggaagatggacatcccgatggcggaaatcagggcaatcaggcgcttggagttgcgcacgggccggtaagcgactcgctcgatactccagccgtaggcgctggcaataataatcgcaccgataaatccagcggccaccaggagccaactggtgtctattcccatcatcattagcgcggcgatgatcataaaagagacgtagctgccgatcatatacacctcgccatgagcgaagttgatcatgccgataatgccgtacaccatcgtataaccgatagcaatcagcgcgtaggtgctccccagcgtgacgccgttaaacatctgctgcaagaaatagagaaactgctcggacataaggtaacctttttaaacccgcccggcgtgcgggcggtgggataacttatcttctggcattacttcgcgacggttgacgagccgtcggcgtgccactggaagacgccaaattcaaatcccttaagatcgcctttttcatcccatttcagcggcccaataacggtatcagccccgttagctttaagatctttcaccagatccagcggagcatggctggcgctacgcgtcattgcggtcgccagtgactggacggcggcgtaggtgatccagacgtacggaccgctgggatctttcttgtcggctttcagcgcttcgacaatcgctttattcgccgggtcctggtcataacgttttggcatcgtcaccaacatgccttccgccgcaccgcccgcaatattggacagcgacgcgttacctacgccttccggccccataaattgcgttttcaggccattagcccgcgcctggcgtagcatctgccccatttccgggtagtagccgccgtaatacacaaagtcgatattctctttttgcaagcgggcaatcagggcggagaaatctttttcgccagcggtaataccatcaaaaaagacaatattggcattgccctgcttcaggccatcctgcacggagcgcgccagtccttcgccgtattgctgtttatcgtgaatgatagcgatgcgctgcggtttcaccgtttccaggatgtatttcgcggctgttggcccctgggaggagtccaggccggcggtacgcataatgtactgatagccgcgctgggtcagctccgggttagtcgcccccggggagatcatcagaataccttcatcttcatagatatcggatgctggctgagtagaagaagaacacaagtgaccaataacgtactgaataccgtcgttaacgattttgttggccaccgccaccgcctgttttggatcgcaggcatcatcgtactctacgccgaccagcttatcgcctttaatcccgcctttcgcgttgatgtctttaatggcctggcgcgcgccgttaaattccatatcgccccattgcgctaccgggccggacatcgccccgactatggcgactttaatatcatctgccattgccccctgcgagactgctaatgcaacaatccctgcgattattgttttcgctttccgtttcatgtgcctgtatccccattcgtgatgttatatgttttgttttttgctggttaaaaagcagactgtactttttataaatggtgcgctttttactgactcattaatgagttagcgcagcatttaaagcataataagattaaaatctctatttttcagtctattaagaaaagataatattctgcttttcgctatagataaacaaaaaaaagcatgcttgtcagcataaaataacggcatattaagcggaataattcactagcattcagggaattatgctgcctgttttccattctctaatgcttcaaactgtaattatcgttgttaaaaaattaataacctggtaaatgacacaaaaaagagaaagcatctggcctgcctgtttcggtacactgatcgcatcttttgaaatcgggacaagccgtcgatgaagctgaccattcttcgtttagaacactttagcgctcaggatcagatcgatctgggcaaaatctggccggaatattccgcctcctcattaagcgtagatgaaacgcaccggatttatgccgcgcggtttaatgagcgtttgttgggcgccgtaagagtgacgctgagcggaacgcagggcgcgctggattccttacgcgtgcgtgaaatcacccgtcgccgcggcgtcgggcaatacctggtagaagaagtcatccgcgataatcccaacgtctcgtcgtggtggatggcggatgtcggtgttgaagaccgcagcgtgatggccgcgtttatgcaggcgttaggttttaccgcccagcatgacggctgggagaagcgctaaaagaaagccggatggcgctgacgcttatccggcctacatgccgggagaaaagataaaaaccacctcgcaattttccaagaatttcgcgttgcaggcaggcggcaagttatgaaatccccgggagcttacataagtaagtgaccggggttgaataacgtagccaacgcacctgcagcgcgaaaggcgccagaaaatcacttagcgtctgtcgccgtaccattcgcatgccagtcaaacacgccgaactcaaatcctttcagatcgcctttctcatcccacgacagcggtcccattacggtgtcgaccgtggcgcctttcaggtatttggcgatttccgccggatcgtcggagtggttcaggcccgcctgcaacgattgcagcgcggcgtaggtggtccacacgaatgcgccgctaggatcttgtttcttggctttgatggcatccacaatcggtttgttcgccgggacctggtcgtagttcttcggtttggtgaccagtaagccttccgctgactctccggcgatgttagacagcgacacgttcgccaccccttccggccccataaactgggttttcagccctgcggcgcgggactggcgcaaaatctgccccatttccgggtgataaccgccgtagtagacaaagtcgatattctctttcttcaggcgcgcaaccagagtggagaaatctttttcgccagcggtgatgccgtcaaagaatacgacgttaacgccgcctttcttcagaccgtcctgcaccgcgcgcgccagcccttcgccgtactgctgcttatcgtggataatcgcgatgcgctgcggttttaccttctccagaatatactttgccgccgttggcccctggtcagagtccagaccggtggtgcgcaaaaccagcttatagccgcgcgcggtcagctccggcgcggtcgccgccggggttatcatcaggatgccttcgtcttcgtagatatcagacgctggctgtgtggaagaggaacataagtgaccgataacatacttgatgccgtcgttcaccactttgttagcgacagctaccgcctgtttcgggtcgcaggcgtcgtcatatttcaccgcgacgagcttatcgcctttaataccgcctttcgcattgatatcggcaattgcctgctccgcaccggtaaattcctggtcgccatactgcgccaccggaccggacatcgcgccgacaaccgcgactttaatgtcgtcggcgaatgccatatggcttaatgacagggcgatacatcctgccaataacgttttacccttcatattcatcctgataatccccattattctggttgttacgtgtgttgtggtgttattgttcagcactttatttcgattattggctagctacccgtgctttagcagcatactctgctaaaacatacccgatttttattattttggaatagctaaatttacatccagataacagatttgtgtcggtgggggagaggaagggtccgtaggcccgataagcgaagcgccatcgggcaaacgtattgccggatggcagcgtaaacgccttatccagcctacaaaaaacaaaacccccgaattcacattcgagggttcattggcaattcgcgaagattacgcttcgatcgcagcgcgaagctttttcatggcgttcttttcaagctggcgcacacgctcagcggagacgccgtaacgatcggccagctcctgcaacgtagacttattgtcttcgtccagccagcgagcgcggataatatcctggctacgctcgtcgagcccctgcatcgcgtcggtcagtcggttggcggcctgctcttcccagttatcgtcttcaatgccgtcggcaaagttagacgatttatcctgcagatacagcaccggcgccattggctggctgtcggactcatcgtccgaagacatgtcaaacgtcatgtcctgcgccgccatacgcgactccatctcacgcacgtctttactggaaacacccagttcgcgcgccaccatttcaacctcatcctgattaaaccagcccagacgctgcttggttttacgcagattaaagaacagcttacgctgcgctttcgtggttgcaactttaacgatacgccagttacgcagcacgtattcgtgaatttctgctttaatccagtgtacggcgaaagaaaccaggcgcacgcctacttccgggttaaaacgacgtacggctttcatcaggccgatgttgccttcctggatcaaatccgcctgcggcagaccatagcccgcatagttacgagcaatatgaacaacaaagcgcaggtgagacaggatcagcgttttagctgcttccagatcgccctggtaatgcagcctttcagccaatgcccgctcctcgtcagccgataacatcggccacgcgttcgccgcccggatataagattccaggttgccaacaggggctaaagctaaattttgcatttctttggtcattcaaatcctctcaatcagtattgcctggcaccgtcagcgagcaacaaccgtgccaaagccgatgagcaacgagaatatcacccactcttttatcagacagtgattttatccacaagttcaatgtaacactgtgcataatttgcacaaatcttgtgacataaagatgacgcgcggggaagagacaacagggactctttccctgcgaacggaagcccattgcagggaaagattataccacgattttatcaatcgggagtaaagtgacgtaaatgttgcaccgtggccagccaggcggcgatccagccaatcatggaacagaccagcagcagcaacaggcactcatcgaacgataagccattgagatcaaacttcgtgccgaagacctgcgccacttcagtcaccgccgatgataaacgcatcaccaaaatttcagacaatatcagtgacagaaacgcgccggaaaaaccgagcaacgcgccgccatagaggaacggacgcaggataaagccatcggtcgcgccaatcagcttttgcacgttaatggtgtcgcgacgggcaaaaatgctcaggcgcacgctgttgccgataacgaggaagaccgccgcgaccatcagcacgccgatcatcgccgatacgcggcccaccagcccggtgagcgccgccaggcgcgcaaaccagctatcatccatgcggacttcgtcaatgccgttaatctgcgagatacggtcgcgcagcgtattaagcgaggcggtactttgaaagtccagcttggggatcaccaccgccaccgccggtagcgggttctcttccagcatatccagcgcgccgccaaaacccgaccagttgcggaattctcccagcgcgtcctcacgggacaggtagttgaccttctcaacgccctgctcggcctgaagctgcccaacaacccgcgccgccgcgtcatcatccagcgttttttgcagataaacggtgatctgcggcgacggataatactgagtcgccgcctggttgacgttcttatagaccatgtaacagacgctgggcagcgtcagggagatggcgatcaccatcaccgtcagaaacgtcgccagcggtttgcttttcagatcttgcagcgcgccgtgccaggcatagcgcacctgctcattaaagacgttcgttttacgtgagttcggtttcggcgtcggcttctggcgtcctggcgcgttgcgcccgccgcctgttccgccgcgagacttacgcagtcgatccagccgtccgccgaactgcctgatttggttaatcgcgtcgcgcctattcattggccaggcctccatgcagatgtccatcgctcaggacgagctgcctataggaacgacgggagataagtccaatatcgtgcgtagccatcagtaccgtcacccctacgcggttaaactcttcaaacagacgtaaaatcccttccgacaacgcgtcgtccaagttcccggtcggttcatccgccagcaataccgctggcttattgaccaccgcgcgggcgatgcccacgcgctgctgttcgcctccggagagttgaatcgggaagtttctcgctttgtccagtagtccaaccttatccagcgccgccgacacacgacgacggatatcatcgccgctggcgccggcaatgattaacggtatcgccacattgtcatagaccgtgcgatccatcagcagatggtgatcctggaaaatcatcccaatctggcggcgcaaaaacggcacttcgcggtttttcaagcgcgtaatatcatgcccgctgaagaagattttgccggcgctgggccgctcaatcccacagattagcttcagcagggtacttttccccgcgccggagtggccggtcagaaacgccatctcgcctggccgcatatggaatgtcactccctgcagcgcttgtctcccgccgagataggccttgctgacatgttcaaagcgaatcattgttaatcctctcgggcaaaaagtgcctcaataaaatcgtccgccttaaacggacgcaaatcctcgatacgttcgcccacgccaatgtaacggataggaatgccaaactggtcagctaccgagaaaatcaccccgcctttcgccgtaccgtccagcttggtcagggtaataccggttaagcctaccgcttcatggaacagtttggcctggcttaccgcgttctgtccggtgctggcgtcaatggtcagcataacttcatgtggcgcttcttcgtccagctttttcatgacgcgaacgatttttttcagctcttccatcaggtgcgacttgttctgcagacgccctgccgtatcggcaattaacacatccacattacgcgccttcgcggcctggatagcgtcaaaaatcaccgaggcggagtccgcgccggtatgctgggcgataaccggaatattgttacgctgtccccagacctgtagctgttcgaccgccgccgcgcggaaagtatcccccgccgccagcatcactgatttaccctgctgctcaaactggcgcgccagtttaccgatagtggtggttttacccacgccgttcacgccaaccatcagaataacaaaaggcgttttaccttcaatattaagcggttcgtctaccttcgccagaatctcgcccatctcgtctttcaacagaccatacagcgcctcggcatctttaagctgtttgcggctggcgccttccgtcagattagcgataatcttacgcgtggtttccaccccgacatcagcgatgagcaactgctcttccagctcctcgaacaaatcatcgtcgattttcttgccgcggaacagactgataaatccggaaccgagattttctttggttttcagcagactgcgtttcaggcgggcaaagaaaccttctttagtcggtttttcctgttcctgaacgatcgcttccaccggcgcgtcttcttccgccggcggaacaaccatcaccgcctcttccgccgcctgagcggccagcgcctgcgcttccagctcttcgtcggtgaatttcgccgcgttttcgccctcttcttctaccgcggcaatgacctctacggtttccgcttcggcctgccactcttccggcgagatagcctcgtctttgacctcttccggcagcggcaattcctcgcgttccactgcgatctgcggcgctgccgtctcaatggccgccgcgggctccggctctaccggctgcggtttttcgctctcctgaactttctcagtaacgtccaccacctcttccgcaaaggcttctgtttctgctttgctgtgcgcgggcgtttgcgcgtctacgtctgccgccgtttcaacagggggctcaaccggtcgttgttcctcaacaatctgctgttcttcggtctgttcctgcttctgctctttatcaccgaagcccaaccaggaaaagaagccacgttttttctgttttgccatctgcgactacacccctcgcggcgctatatacatggaagctaaaaaaatgatgaaatagtctatcacttaacttaattcacatcaccgcctggaataacttgcaacaggcggttcgagcaagagaaatgaaaaaaccgactcactctggcagcggccaaatccgcattattggcgggcaatggcgtggccgtaaattaccggttccggacagcccgggtctgcgtcccaccaccgatcgcgtgcgcgaaacgttatttaactggctggctccggtaatggtagacgcccattgtctggattgctttgccggcagcggcgcgctgggtctggaagcgctatcacgttatgcggcccaggcaacgttactggaaatggatcgcgccgtatcgcagcagttgcaaaaaaatctggcgacgctgaaagccaacaatgctcgcgtcgtcaataccaatactctgaccttcctcagccagccggggacgccgcatcacgtcgtctttgtcgacccgccgtttcgtaaagggctgctggaagagacgttacaattgctggaaacccagggatggctggccgacgacgcgctaatctacgtagaaagcgaggtggaaaacggtctgccgcccgttccggcgaactgggcattgtatcgagaaaaggtggccggacaggtcgcttatcgtctgtatcagcgcgacgcgcaaggagaaaatgatgttgattaatctgggccgcttattaatgctcttcgtgtgggcatttttgattcttaatctggtgcatcccttcccgcgcccgctcaatatcttcgtcaacgtggcgttggtgttcatggcgctgatgcacggtatgcaactggcgctgctgaaatcaacgataccgaaagcgggtccgcagatgacgacgggagagaaaatccgcattttcctgttcggcgtgtttgagctgctggtctggcagaagaagtttaagaacaaaaaataacgtttgctgccggatgacggtttattcgttatccggggtacggctaacaaacccgacgaaccgcgttcccttatagctcagcgtaccttgatcgcccaccgtcaaagcgtggtactgctgcgcttgtaaacggaacgttttttccagaccgccattgagcggcttaaaactgacctcatagcgcatactggttcccgccgggatcacttcctgctggcgagagcgtcggtcattaaccggcttctcccgtttattgctgaccacgacctgcttttgctgtaacggcgccgcctcattagcggctttttcccgccgttgctgaacgaagcggaacgacgcggcaactacgattaatgcaatgattataatgaagaaaagcggtggcttactcatactgttaacctgtcagaaaatgcggaaataagcataccctgcccgttatagtgttgtcatctgaccgtcacggcctctacactgaataatagagccgcaagcataccgtttgcgaaaaaataacgaattcaaggaattaagatgctttggtcgtttatcgctgtctgcctgtccgcatggctgtatgtggacgcctcctatcgcgggccagcctggcaacgctgggtttttaagcccgtcacgttattactgttgctgttactggcctggcaagcgccgatgtttgacgccatcagttatcttgtgttggccggactgtgcgcctcgctggtcggcgatgcgttaacgctcttaccgcgtcaacgcctgctgtacgccgtcggggcatttttcttatcgcatctgctctacaccatttactttgccagccaaatgacgttgtcgttcttctggccgctgccgctggcgttactgatagtcggcgcgttgcttatcgccgttatctggacgcgactggaggagctacgctggccggtatgtacttttatcgccatgacgctggtcatggtctggctggcgggcgaactgtggttcttccgcccaacggcgccagccctttcggcctttaccggcgcgacgctgctgttcatcggcaatatcgtctggctgggtagccattaccgccgccgtttccgggcggataacgcgattgccgccgcctgctactttgcaggacacttcctgattgttcgctcgctgtacctgtaaataatagcgcttgactctggagtcgactccagagtgtatcctccggttaatgagaaaattatcatcaaccggaggacgttatgtcgacccctgataccgatggcaaaaaagtcccgccctttacctccttcagattagccccggcaatacagaaggccgatagctgctgctgcgaagaacattgcgcgtccagcgcgcctgtttctactgccatggcaggcacgcgctatacctggaaaatctccggcatggactgcgccgcctgcgcccgaaaagtggagaatgcggtacgccaaattcgcggcgtcaaccaggcgcaagtgctgttcgccaccgaaaagttagtggtcgatgccgacgccgaccttcgcgcgcaaattgaacacgccgtacagaaggcgggttataccttgcgtagtgaagattcgcgcgacgccgcacctgaatctcgtcttaaagagaacctgccgcttattacgctgatcattatgatggcgataagctgggggctggagcaatttaaccacccgttcggccaactggcctttatcgccaccaccctggtcggtctgtatcctattgcccgccaggcgctgcgactgatgaaaagcggcagttggttcgctattgaaacgctgatgagcgtcgccgccattggcgcgctgtttattggcgcgacggcggaggcggcaatggtattgctgctgttcctcatcggcgagcgcctggaaggatgggccgccagccgcgcccgtaaaggcgtcagcgcgttaatggcgcttaaaccggaaacggcgacccgtctgcgcgacggcgtacgggaagaggtcgctattaataccctgcgaccgggcgatattatcgaagtcgccgccggggggcgtttacccgccgacggtaaactggtttccggtttcgccagctttgatgaaagcgcgctcaccggcgagtctatcccggtggagcgcgcaacgggcgacaaagtcccggcaggcgcgaccagcgttgaccgtctcgtcaccctggaggtgctatctgaacctggcgccagcgcgattgaccgtatcctgacgctgattgaagaggcggaagagcgccgtgcgcccattgagcggtttattgaccgtttcagccgcatctatacgccagtcattatggtcatcgcgctgctggtgacgcttattccgccgctgatgttcgatggcggctggcaggagtggatttataaagggctgacgctgctgctcatcggttgcccgtgcgcgctggtgatctccacgcccgcggccattacctccgggctggcggcggcggcacggcgcggcgcattgattaaaggcggcgcagcgctggagcaactgggccgtatcacgcaggtcgcctttgataaaaccggtacgttgaccattggtaaaccacgggtgacggcgattcatccggcaagcggtatcagcgaagctgaactgttggcgctggcggcagccgtagaacaaggcgctacgcacccgctggcacaggctattgtccgcgaagcgcagacacgcgatctggcgatcccgacggcggaatcgcagcgaacgctggctggcaccgggattgaagcgcaggttaacggcgaacgtattctgatttgcgcggcgggaaaacagcctgcggcagcgtttgccgggcaaattagcgaactggaaaacgccgggcagacggtggttctggtgctgcgtaacgagaccgttgttggcgtcctcgccctccaggatacgttgcgtgacgatgcgcgcgacgccatccgcgatctgcatcagttaggcgttaacggcgtgattctgactggcgataacccacgggcggcggcagcgattgccggcgagctggatctggcgtttaaagccgggctactgccggaagacaaggtgcgggcagtcaccgcccttaaccaacaagcgccgctggccatggtgggcgacggcattaacgatgcgcccgcgatgaaagccgccagtatcggaattgctatgggcagcggtactgacgtcgcgctggaaacggctgacgccgcccttactcataaccgtctgcgcgggttagcgcagatgattacgctggcgcgcgctacccacgcgaatatccggcagaacatcaccattgcgctggggctgaaagctattttcctggtgacgacgctactgggttttaccgggctatggctggcaatcctggcggatacgggagccacggtattggtgaccgccaacgcgctacgtttgctgcgtaaaaactaatcttctcccgcccggcggcgtcgtgtcgccgggttatcccgcgatattcctttctttgttcatattattcacgcgaaaattatttattttctattacttatcaaaccattaatcagaaatagcgtgatttgatgtaaggttaatttttatccaaccgatattgatcataccgtctacaaaataaggaatgttaggcactatgaaaaatatcaaagtcatcaccggcgttatcgcgacgctgggcatatttagcgccttattgctggtgacaggaatactgttttattccgccgtcagcagcgatcggctgaatttccagaatgcgagcgcactgagttaccaacaacaggaactgggcggcagttttcagacattgatcgaaacccgcgtcaccattaaccgcgtggcgatacgcatgttaaaaaatcagcgcgatcccgcctcactggacgccatgaacacgctgttaaccaacgctggcgcgtcgctcaacgaagcggaaaaacatttcaacaactacgtgaactccgaagcgatcgcgggcaaagatccggcgttggatgcccaggccgaagccagctttaagcagatgtatgacgttttgcagcagtctatccactatcttaaagccgataattacgccgcctatggcaaccttgacgcgcaaaaagcgcaggatgacatggagcaggtatatgaccagtggctctctcaaaatgcgcaattaataaaattagccagcgatcagaatcagagcagctttacccagatgcaatggacgctggggataattctacttatcgtactcatcgtgctggcgtttatctggctggggctgcaacgcgttctactccgcccgctgcaacggattatggcgcacattcaaacgatcgccgacggcgatcttacccatgagatagaggctgaaggacgcagtgaaatgggccaactggccgccggtctcaaaacgatgcagcagtcgttaatccgtaccgtcagcgcggtgcgcgataacgcagactctatctatactggcgcaggcgaaatttccgccggcagcagcgacctctcttcccgtaccgaacagcaggcctcggcgctggaggagaccgccgccagcatggaacagttaaccgccacggtacggcaaaacaccgataacgcacgacaggcgacgggtctggcgaaaaccgcatcagaaaccgcgcgtaaaggaggacgcgtggtggataacgtagtgagcaccatgaacgatatcgccgaaagctcggaaaaaattgtggacatcaccagcgtgattgacggtatcgccttccagactaatatcctggcgctgaacgccgcggtagaagccgcccgcgccggcgaacaggggcgaggattcgcggtcgtggccggagaggtacgcacgttggccagccgtagcgcgcaggccgccaaagagatcaaagtactgattgaaaactccgtgtcgcgcattgataccggctctacgcaggtacgcgaagcgggagaaaccatgaaagagatcgtcaacgccgtgacccgcgtgaccgatattatgggcgaaatcgcctctgcctccgatgagcaaagcaaaggcattgagcaggtggcgcaggcggtatcggaaatggacagcgtgacgcagcaaaacgcctcgctggtagaagaatccgcagcagcggcggcggcgctggaagatcaggctaacgaacttcgtcaggcggtcgccgcgttccgcatccagaaacagcctcgtcgggaggcgtcgccaacgacgttaagcaaaggtttaacgccacagcccgccgcagaacaggcgaactgggaaagcttctaatcagaatagtatctgccgtgcagttaatgcgctttacgcaataaataacggtacggcagaccctccgtctcttgcgccagcaaatcgtgttccataaaggtacagaaccccggaatatcacgcgtcgtcgccggatcgtcggcgataatcagcaatgtttcgccagtttgcatgttgcgcaccgttttgcgcaccatcattaccggttcagggcaacgcagccccagggcgtcaagcgtatggtcaggggaggaaaacagatcgctcatcttcgtctcaatggtagaaaaacggcgatattttacgcccatcttcgtcagtaagccaggcaggttaacgattgcgtgaaaattagccattgcaatgccagcgcaaaacagtattatgcggcggttctttattgggttccctcaccccatccaacaaaaaggtcacaatatgactccgtttacacaatcacagcgcataaaagcgttgttctggctatcgctattccatttactggtgatcatttccagtaactatctggtgcagctccccatcactatttttggtttccacacgacctggggcgcgtttagttttccttttatttttctcgccaccgatcttaccgtgcgtatttttggcgcaccgctggcgcgccgcattatcttcgccgtcatgatccctgcgctgctggtgtcatatgtggtgtcatcgctgttctatatgggcgcctggcaaggtttcgccgcgctggcgaactttaatctgtttgtcgcccgtatcgccgccgccagctttatggcctacgcgctgggacagatccttgatgtccatgtgtttaaccgcctgcgccaaaatcgtcgctggtggctggcgccgaccgcttcaacgctgtttggcaatatcagcgatacccttgcctttttcttcattgcgttctggcgaagccccgatgcctttatggccgggcactggatggaaattgcgctggtggattattgctttaaggtgctcatcagcattattttcttcctgccgatgtacggcgttctactgaatatgttgctgaaaaagctggcagataaatctgaaatttccccattaccggcaagttaaaggttcgttttccgagttgtgataagatgagcgaatgagccgttatggccgtttatcgaaaggaagaagtcaatgcgcaatttggttaaatatgccggtattggcctgctggttatggggcttgcggcctgtgataacaacgatacaaaagcgtcggcagaaagcgccgccgcggaaagccaggcatccggtcagcccatcagcctgatggatggcaaactcagtttctcgctgccggcggatatgaccgatcaaagcggtaagctgggcacccaggcgaataatatgcacgtttattctgacccgacgggccagaaagcggtgattgttatcgtcggcgataataccgatgaagcgttgccggtgctggcaaaccgcctgcttgagcaacagcgtagccgcgacccgcagcttcaggtcgtcaccaataagtctattgagctcaaaggccatacgttgcaacaactggacagcattatctccgcgaagggccagacggcgtattcttccatcgtgctgggcaaagtggataaccaattgctgacgattcaggtcacgctgcctgcggacaatcagcaaaaagcgcaaaccacggctgaaaacatcatcaatacgttggttattaagtaacctttacgacgatgatgcggcctccggcagtgcagacggaggccgtttttttaagcgccaggtcagcaatagcgccatcgctaccagcccggccgccgccagataaatcaccggcacgcccgcccaggtcatcaccagccctgccagcggcccggtaacccccaaagacatatccataaagacggtataggtcgccagcgccgcaccctggttctgcggcggcacggctttgacggccaccacgcccagcgccggaaagaccagagaaaaacccatccccgtgagtaaaacgccgatttttgccatccacggcatggctgccgttcccaccagtaacagaccaataatctccacgccaaagcagatcatggcgacattcaacccgcctaaacgattgatgccgttagggaacagcaaacgcgtgccgacaaacgcgacgctaaataacgtgagcgcaaaagcggcgccatcccagcctttagcatcataaaataaggtaataaacgtcgcgatgacgccaaaccctgccgaggccagcgccaacgccataccatacagccagacacgccccagcaccgcgcgaaacggtagcggcttgcctttgttcgccttcaccgacggacgtggaagggctaacagtaccgccaacagcgccacgcccatcaccgttagcgccagtccctgtaacccgccccaggcataacacagcacgcccagcggcgcgcccatcgccattgcgccgtaggtgacgataccgttccaggagatgacccgaccaatatgcaacgacccgacgacgccgacgccccacagtgtcgaaccggtgccggcaaaactttgcccaatccctaaaatcacgcgacccagccccagtagcaacaaactgatcatcggccaggcgctggcgatatccgccagcaggtagccgagtccgcttaaaaaacagccgcataagccaaagacaacgatttttttcggccctaatacatccgcataccgcccggcatggggacggcttaacagagtggcgaagtattgcaggctgataataagccccgcccagaacgcgctgaatcccatcgcatcatgcacatagccgggcaagacggcgagcggcaggccgatggtcaggtagctggcaaagttaaacatcacaatggagacaatacgcagattgaggcgcaatccgtttagcgccggttcagcgacgggttcgggcatgagtatcaccgcatttttacaacatgttttcttttctatcatggcgcgcggtgaaaatcagtagtgagattcagattatcggtatcagggcagccgctacacttagaaaaaaacacaacaaggaaaacttcatggcaaccgctcaacccgacaaaacgggtatgcatattctgctgaaactggcctccctggttattattctcgccgggattcatgccgcggcggatattattgtacaactcttgctggcgctctttttcgccattgttcttaatccattagtgacctggtttattcgtcggggcgtgaagcgaccgctggcgattactatcgtggtggtcgtcatgctgatcgtgcttaccgcgctggtgggtgtgcttgccgcatcgcttaatgaatttatcgctatgctgcctaaatacagcaaggagctgacgcgtaaggtcttacaccttcaggagttaatgcccttcctgaatttacatatgtctccggaacgtatgctccgcgggatggattccgataaaatcatgctcttcaccacaacattaatgaccggcgtatcgggcgcgatggcaagcattgtgctgctggtgatgaccgtggtttttatgctgtttgaggtgcgtcacgtgccttataaattacgtttcgcgctaaacaatccacaaatccatattgccggcctgcaccgcgccctgaaaggcgtctcgcattatctggcgctgaaaacgctgctcagtttatggacgggcgcgattatctggctgggactggcgttaatgggtattcagtttgcgctaatgtggggcgtactggcctttttgctcaattacgttcctaatatcggctcggtgatttccgccgttccccccatgattcaggcgctgttatttaacggtttttacgagtgcgtactggtcggcgcgctctttttggtggtccatatggtgattggcaacattatggagccacgcatgatgggccatcgtctgggaatgtccacgctggtggtatttctttcgttattggtctggggatggctattaggcccggtcgggatgctcttgtccgttcctttgaccagcgtctgcaaaatctggatggaaaccactaaaggcggcagcaaactggcgatcttactggggccaggccgaccgaaaagccgtttaccgggatgaggcgacagatgctacaatctcctcttcttcataggcaacgttggtcctgatatgtaccaggtcgttctgggaaaagtgtcaacattaagcgcaggtcaattgcccgacgcgttaatcgctcaggcgccgcagggcgttcgccgggcaagctggctggccgggcgcgtgctgctttcccgtgcgctctcgccgctaccggagatggtgtatggcgaacagggtaaaccggctttttccgccggagcgccgctgtggtttaacctcagtcatagcggcgacactattgctctgttgcttagcgacgaaggtgaagtcggctgcgatattgaagtgatccgcccgcgcgataactggcgttcgctggcaaatgcggtattcagcctcggcgaacatgctgaaatggaagcggaacgtccggagcaacaactggcggcattctggcgtatctggacgcgtaaagaagccatcgtaaaacaacgcggcggcagcgcctggcaaatcgtcagcgtggacagcacgttgccctctgccttgtcggtcagccagtgtcagctcgatacgctcagtctggcagtctgtacccccacaccgtttacgctgacgccgcagacgataacgaaagcgctatgacacattaatttttccctctggcggcggacgtgtgttacaaaatgcggagcttcccatgcgccgacgcgccataccaaaaggtttaagtcagatgcaacgtgtcaccatcaccctcgatgacgatttactggaaacgctggacagcctgagccagcgacgcggctataacaatcgctccgaagcgatccgtgatattctgcgcggcgctctggcgcaggaggccactcaggaacacggcacacagggtttcgcggtactttcatatgtttatgaacatgagaaacgggatttagccagccgcatcgtctccacccagcatcatcatcatgatttatccgtcgccacgctgcacgtccatatcaaccacgatgactgtctggagatcgccgttctgaagggcgatatgggcgacgtacagcattttgccgatgatgttatcgcccagcgcggcgtgcgccacggccacttgcagtgtttgccgaaagaagactaacgccgggggcgcttcgcttgcccggcctacgttcgcacgtctgtcgtttgtaggccggatgaggcgcagccgccatccggcaataatgtttacgccattgtgccaatcgtttttctgaagcgtaacagcgctatcaggaagaacacgccgcctatcgccagcagggtcaggaactgcggccagacgatactcaaacctgcgccgcgataaagaatagcctgggcaaggctgacaaaatgcgtcgtcggcatggtcagcataatatcctgcaccgcctgcggcatactttcgcgcggcgtggaaccgccggagagcatttgtagcggcaacagcaccagaatcattaataaccccagctgcggcatcgaacgggcgatggtgcccataaaaatcccaattgaagtggtggcgaacaggctcagcgccacgcccaacataaacaatgggatcgatccttcaatcggtacgccaagtacgcctttcaccatcagcatcaaagacaaaccggaaaccaccagcacgaccagccccatcgaccacactttcgccatcatgatctcaaagggcgtgaccggcatcactaacagatgctctaccgtgccgtgttctcgctcgcggatcagcgccgacccggtcagcactatcgccagcatggtaatgttgttgataatcgccatcacgccgccaaaccacgccgggtcgagattcgggttaaagcgcatccgaatctccagcgacaccggctgaacgttatctccccgcgcgcgcgccacaaagctgttgacctcgccgctaataatattctggatataactgttgccggtaaacgcctggctcatgcgcgtcgcatcgacgttaacctgaatatcaggctgacgtccggccagcacatcacgctggaaattcggcggaatattgaccgcaaaggtatagcgtccggcatccagtccggcatccatttccgttgccgtaatcatctccggcggcagaaaccacgggcggtaaaaactattcacaatacggttcgacaactgcgactgatccatatcggcgatggcgataggggcaagatgcaacgaaccgggcaggacggtagcagaggagtaaaccgaaatcgtaaaggcgaagacgatcagcgccagcatcgctttgtcgcccagcagactgcgcagttctttgacgccgaggttataaatattacgtaatccgcgcattacccctcctgttttttcagcagcagaatgctcagacccatcaccaccgggacggcaatcagtaacggcataaataacggccagagatcggacagatccaacgctttggaaaacgtcccgcgcgcgatcgtcagaaaatgactggtcgggtagatctcgccgatccatcttcccggtccttccagcgaagccaccggatcgatcatgccggaaaattgtgttgccggaatgagggtaataatcgacgtcccaaaaatagcggcgatttggctcttcataaacgtggagatcagcagccccagaccggtggcgatgatgacataaagcagcgccgcgagggtaagcgtgagaaagctgcctttcagcggcacgccgaacacaaagaccgacagcgcgcacagtagcaagaagttcagcatacccagcgcgatatacggcagttgtttacccagcaaaaattcgctgcgcgtcgtcggcgttacgtacagattaatcatcgaccccagctctttctcccgcaccacgctcagggcgctaagcattgacgggatcatcatgagcagcagcggaatgaccgccggaacgatagcgggcagacttttcacatccgggttatagcgatagcgcgtttcaatattgagcagcccgacctgtttaaccgggttcggctgacgacttgccgcctcctgcagccagctttggtgcatcgcctgaacgtaccccttcaccgtctcggcgcggctgggcatggcgccatccacccagacgccaatctgcgctggcgtaccgcgagcaatatcgcggccaaaattaggcgggatctcaatggcaaccgccagctctcccgaacgcatccgccggtcaagctcgtcatagctggcgagcggcggctgttcgataaaatagcgggatcccgccagattgagcgaccatgcctgactactgacggtctggtcacgatcgaggacggcaaaacgcaggttctccacgtccatactgatgccatagcccataatcagcatcagaattaccgttcccagcagcgccagcgtcgagcgtaccggatcgcggcgtagctccagcgcttcgcggcgactgtagctgaacaaacgccggaagctcaatccctgccgcgacggtttacctgacgcggcgggcgtctgggatggcggtattggggtttcaggcgccgctcccgcagcttcctgtagccaggaaataaacgccgcctccagattggccgcgccccgctgttgcaccaattcctgcggcgtaccgctggcgagcactttaccggcgtgcatcaatgacattcggtcgcaacgttccgcttcgttcataaaatgggtcgagataaaaatcgtcaccttatcctgacgcgaaagatcgaccataagctgccagaacatatccctggcgaccggatcaacgccggacgttggctcatcaagaatcagcatttccgggcgatggatcaccgctaccgccagcgataaacgctggcggataccgagcggcaacgaagcggggagcgtatcttccacctccgttagcataaagcgttcgatcatctgcgcgacgcgcgccgggatctccgctggcggaatatgaaacaggcgggcatgaagttccagattctgccgcacggtgagttcgttatagagcgaaaaagcctgcgacatatacccgacccggcgacgggtgtcgatgtcgttcgggtctaccggctggccaaatagccaggcctggccttcgctggcgggaagcagaccggtcagcattttcatggtggtcgatttgccgcaaccgtttgaaccgaggaagccaaaaatctcgccgcgcggaatacggaaattaacatggtcaaccgcgacgaacttaccgaagcgcatggtcagatctttcgcctcaatggcaatctcttcctgctcagcgtgatacggcgggatcaccaccggcttatgcgcctggcgctgcgcttctggcaacagggcgataaacgcctgttccagcgtcgcgctatgggtttttgcccgcagttgctgcgcgctgccggttgccagtatctcgcccgcattcatcgccaccagccagtcaaaacgctccgcctcttccatataggccgttgcgaccaacacgctcatattggtctggcgctggcggatactgtcgattaagtcccagaactgagcgcgggagagcgggtccacgccggtggtaggctcatcaagaatcagcaattccgggtcataaatcagagcacagcacaaccccagcttttgtttcatcccaccggacagcttcccggcaggacggtcacgaaacggcgccaggccggtgctgttcagcagctcggtaatacgcgcttcgcgttcagctttgtcatgaccaaagagacgagcgaaaaaatcgacgttctcataaaccgataacgtgtgataaaggtttttccccagcccctgcggcatccaggcgatgcgcggacagacgtcgcggcgatgtttcgcatcgcgcatatcgccgcccaggacgataacgttcccttgctcaatcacccgcgcgccagaaatcagcgacagcaggctcgacttacccaccccgtccggaccaatcagcccgaccatactacgggcgggaatgtccagcgtgatattgttcagcgcgaccgtttttccgtaatgctggctcaccccctcaagctgcgccacgggaggaacaggcaccagcgtcagcgacgtcattgcgacagcctcacgcttagagcgtcaggccagggcacgcgctcatccagacgaacccaggccattcccggcaaaccggttttgacatattccagatgctgtcgcagcagctctggcggaatacgcgctttgacgcggaacatcagcttcagccgttcatcgtgggtttccacggttttgggcgtgaactgcgccacgctggcgacaaaactgatcgtcgccggaatacgcagatccggcgcggcgtccagcaccagtcgcgcttcgccgccgatcttcaacaacccagcctgttcggtcggcaggaaaaatgtcatataaacgtcgctgagatcgaccatgttcaacacccggccgccagccgataacacttcgcccggctccgcaacgcggtactgcacgcgtccatcgcgcggcgcttttaattcgctgtcgtcgatgtcggcgacaatacgccgctcggtcgcctgcgccgcttccacgcgcgtttgcgcctggataatactggtacgcgccgcctcaatcgccgcttttgccgcagatacctgcgctttggcggtctccagggcggcgcgcgcgctttccgccgccgcgcgatcgtcatctaactgttgtacagataccgcgccacgctgcgacagcgaacgggaacgcacgtgacgtttagagacggagtccagctcagcttcccgctgtttgacgaccgactgcgcggcgcgcatttcactctggcgttgctccagcaaggcacgggcggcggcaaccgcgctttcggcctctttaatctgcgcaatcgcctccagccgctgctcctgcagcacgcgggtatccattttcgccagcacctcgccctgacgaacgaactgcccttccgaaacgaggatggtatcaatacgcccggcaatcttagtggcaatatccacttcggtggcttcaattctgccgttgctggcggcaaacccctccggtattcccgcagggcgcagcatccaccaggctatcgcggccaccgccacaagaatccccgctccccaccacaccagatgacgcttcattttgtccataatcgacccgccgtaatccctgttgtctaaccatgcgtgtcacaaagtccgccgggcgtgcgctcagcgggggtttccattcgggataagaatgaaaaaagaaaaggggccagacgacgaacagacgccgatgaagcgctcgccgtcaaagggagtgaatgatgtaggtacccggaaaagagggagtaatgttgtcatcatcagcgttcctggccgtaaatgaaacacgcatactcataactgctataaatcgatactaacacctctgtccgggatgtctattcgcttattgtttgtaatggtacttagcgttttgccgccaaatcctgcgcacaggcccaggcgctcgaccaggcccactggaagttatagccgcccaaccagccggtgacgtccatcacttcgccaataaaatagagacccggcacgcggcgcgcttccatagtccgcgatgatagttcgtttgtatccacgccgcccagcgtcacttccgctgtccgatagccttcggtgccgttaggctgcacttgccaggccgtaagcgtgtcaaccaacgcctgctggtcacgaacgttcaactgcctgagcgatacatccgggatctgccccaactgttgtaaacactccaccaaccgtttcggcagatgcatcgccagcgtgttcttcagactctggttcgggtgcgcgttacgctgttcattgagaacgtcttccagcgagagatccggcaataagttaatgctcactaactcgcccggttgccagtagctggaaatctgtaaaacggcggggccggacagcccacgatgggtaaaaagtaggttttcccgaaataccgtgccattgcgggcggtaatcacgcagggcacagagacgccagacagcgtctggagctgttctaacagcggcttatgtagcgtaaagggcaccagcccggcgcgcgtcggcaacactctgagaccaaactgttcggcgattttatagccaaacggcgatgcgccaagccccggcatcgacaggccgccgctggcaatcaccagcttttgcgtagtcaccgtctcgccgttcaacgccagtatgaaacccgactcatcacgctcgacgctcaatacctcgctacgcaggcgcatcgttacgccgcctttgtcgcactcggcaaccagcatatcgacaatgcgttgggcggaatcatcgcaaaaaagctgtcccagcgttttctcatgccaggctatcccatacctgtcgaccagatcgataaaatcccactgggtatagcgggctaacgctgatttacaaaaatgggggttctggctcaaatacgcagcaggctcaacataaagattagtaaagttgcagcgcccaccgccggacatgaggattttacgtcctggcttcttgccattatcgatgagcagcacgcggctacccgcctgtcctgcctgcgcggcgcaaaacatgcccgctgcgccagcgcctataataacggcatcaaacctttccacgtcgccttcctctctcaaattcgggcgggaattgtaaagtttcctcagtggtcgcaccagcgcgaaaagcgcctgaaaatggtatttatctgaaatatataagataattctttagtgatatcaaacaaagcacgaagtacatcaaaaaaagtctatatttcactttgcccgcgccgccaaagtcactgataatgcgccgcgttcatgtcctcaaaatggcgtaacgtcctatgctacatttgtttgctggcctggatttacataccgggcttttattattgcttgctctggcttttgtgctgttctacgaagcgattaacggcttccatgacacagccaatgcagtcgcaaccgtgatttacacccgtgcgatgcgttcgcagctggcggttgtcatggcggcggtgtttaacttttttggcgttttgctggggggtctcagcgtggcgtatgccattgtgcatatgctaccgacggatctcctgctcaacatgggttccgcgcacggcctcgctatggtcttttccatgttgctggcggcgattatctggaacctcggtacctggtatttcgggttgccggcgtccagttcccacacgctgattggcgccattatcggcatcggtttaaccaatgcgatgatgaccggcacgtcagtggtggatgcgcttaacatcccgaaagttatcaatattttcggttcactcattatctcccctattgtcggtctggtattcgccggcggtctgattttcttgctgcgccgctactggagcggtactaagaaacgcgcccgtatccacctgacgccagccgaacgtgaaaagaaagacggcaagaaaaagccgccgttctggacgcgtatcgcgctgatcctctccgctatcggcgtggcgttttcgcatggcgcgaacgatggtcagaaaggcattggcctggtcatgctggtgctgattggcgtcgcgcctgcgggtttcgtggtcaatatgaatgcctccagctacgaaatcacccgtacgcgcgatgctatcaacaatgtcgaaacgtactttgagcagcgtcctgacctgctgaaagccgtcaccggcgttgaccaactgattccctctccggaaccgggcgcgactgaaccgactgaattccactgccatccggctaacaccattaacgcgcttaaccgtgcgaaagggatgctggcaaacgtggaaagctacgacaagttaagcgttgaacagcgtagtcagttgcgtcgcattatgctgtgcatttccgacacgaccgacaaagtcgtgaaattgcctggcgtaagcagcgatgaccagcgcctgctgaaaaagctgaagaccgatatgttaagcaccattgagtatgcgccagtgtggatcattatggcagtggcgttggcgctgggtattggtacgatgatcggctggcgtcgcgtggcgaccactatcggcgagaaaattggtaaaaaaggcatgacgtatgcgcagggaatgtcggcgcagatgacggcggcagtctctatcggtcttgccagctacaccggtatgccagtttctaccactcacgtactctcctcttcagtggcgggaaccatggtcgttgatggcggcgggttgcagcgtaaaaccgtgaccagcattctgatggcctgggtatttacgttaccggcggcgattattctttccggcgtgctgtactggctttccctgaagattatttaagccaaatgggccggatagcgctgtcgctaatccggcctgtcaggatgaaacgacacaggcctgataggccgctataagcggcgtcatccggaggcttatctaatacgagcgggtcaggaaactggcccgctttttttattcagtgccaaatcatgagcgcaatcaagctcaccaccaccaaaccgcataacgcgctggtcagcagaaactggcggcgcacgcgttcacaacggcgaataaattcttcatcatgatgatcgcgatagcgctgagcgtagatataccataccaggcgcacctgtttgttgggctgaccatgcgtggtaaagaagccgccgccatcgacatattgatagagcaaaggatcgcaaccacgaagtaccactaacagtgcgcgtagcgatgagaaatagcgcgccatattaacaatgcaaacgacacataaagcccagaatagtgagacggtgcttatcatatctcctccccggcgacccgcccacggagttcctctccgggactaccgctccccgataccctgccagacaatcagtgaaagagtactacgaaagccgtccatattagcgctccgcattcgaacggctcttatacacattgtaggagatcagttaatttttttaccagaaggttaatcactatcaatgcaattccctagaaattttgtttaactaactggcaagcaaggcagattgacggattatcctggtcgctataatgtaaggatagttatggtaaacggctgagctagccccgcgcatagagttcgcaggacgcgggtgacgcggcggcataagaaacgccagtagctcaatggtcatcgacaacttatggaaggagtaacactatggcttataaacacattcttatcgcagttgatctctccccggaaagtaaagttctggttgaaaaagcggtctctatggcgcgcccctacaacgcgaaaatctccctcatccacgttgatgtgaactattctgacctgtacaccggtctgattgacgtcaatctgggcgatatgcagaaacgtatctccgaagaaacccaccacgcgctgaccgagctgtctaccaacgctggctaccctatcactgaaaccctgagcggtagcggcgatttgggccaggtgctggttgatgccatcaagaaatacgatatggatctggtcgtttgcggtcatcaccaggacttctggagcaaactgatgtcttctgcgcgccagctgatcaacaccgttcacgttgacatgctgattgtgccgctgcgcgacgaagaagagtaatacttgccgtgccggctggcggctaagaccgcgtctggtctatagtcaatcaggttggcctgaaccatcaggcaaattccggctatcaacaacaacgcccgcttatgtgggcgttttgtttatccccccttcttcgcagtactcagtacatcattccatcacaccaaacataattagtgtgatccactaattagtttgcgtatcatttgtataataacctattgatcaggctaataaccgcagtctatatcagggtaagtcttttcggcgcgttttgatatacgcgctcatacgtttcgggatggcattaaaaggcgaaggaatatgaatacaactgcacctacgggcttgctgcagcaacctcgtccattcttcatgatcttttttgtagaattatgggaacgatttggctattacggcgtccagggcatcctggcggtctttttcgttaaacaattgggtttttctcaggaacaggcctttattacctttggcgcttttgcagcactggtttatggcctgatctccatcggcggctatgttggcgaccatctgttagggactaaacgcaccctggtcctgggcgcaattgtgctggcgattggctattttatgaccggcatgtcgctattaaatcccgatctgatttttatcgcactgggtacgattgccgtgggcaacgggttatttaaagccaatcccgccagcctgctctctaaatgctatcagcctaaagatccccggctggatggcgctttcaccctgttttatatgtcgattaacatcggttctttgttatcgctatcgctggcgccggtgattgccgataaatttggctatgcggtgacctataatctgtgcggcgctggtttaattgttgcgcttctggtgtacttcgcctgccgtggcatggtgaaaaatatcggttctgaaccggatcataaaccgctacgttttcgcaatttgctgctggtactactcggcaccgtcgtcatgattttcctctgcgcctggctgatgcacaacgttaagattgccaatctggtgctcatcgtcctttctatcgtcgtcactattttcttctttcgcgaagcgtttcgtctggataaaaccggccgcaataaaatgttcgtggcgtttattctgatgattgaagccgtgctgttttacattctgtatgcgcagatgcctacctcgctgaacttctttgcgattaataacgtgcatcatgaaattcttggattcgccattaacccggtgagttttcaggcgctgaacccattctgggtggtcgtcgccagtccggtactggcagcgatttacacccggctgggtagcaaaggcaaagatctgactatgccgatgaagtttacgctcggcatgttcctctgcgcgctgggttttctgaccgccgccgccgggatgtggtttgccgatgcgcaaggattgacgtcgccgtggtttatcgtgctggtgtatctgttccagagtctgggcgagttgttgattagcgcgctggggctggcaatggtcgccgctctggtgccgcagcatctgatgggctttattctgggaatgtggttcctgacccaggccgccgccttcctgctcggcggttatgtggcgaccttcactgccgtaccggaaaacatcaccgatccgttgcagacgctgcccatttataccggcgtctttagcaaaattggtctggtaacgctggcggtcaccgtggtgatggccattatggtgccgtggttaaaccgaatgattaatacgccaggtaccgaacagtaatactcagtgccggatgcggcttacgccttatccagcctacaaataattgagaatcgtaggcccgataagcgtagctccatcgggcaatccgttactccgtcagaggggttccggcataaatatcaaaccgatgccctttggtgacgatggcgttgggcgtcgcgacatccgccagcggcggcgcataatcgggacgtttaaccaccacgcgtttggtcgccaactgacgcgccggttccagcagtccgtcggcgtctaaatccggccccaccaacgactgaaacacccgcatctctttcttcaccagcgcgcttttctgccggtgaggaaacatcggatcgaggtagaccacctgcgggcgcggcgtgatatcggtcaacgccgtcaggctggaagcatgaatcaactgcaaacgctcctgaagccagccgccaatgtccgcatcggcgtagccgcgcgtcagaccgtcatcgagcagcgcggcaaccaccgggttacgctccagcatccgcacgcggcaaccgacggacgccagcacaaacgcatcgcgccccagtccggccgtggcatcaaccacatccggcaggtaatcgcctttgataccgacggctttcgccaccgcttcgccgcgcccgccgccgaacttgcgccggtgcgccatcgcgccgccgacaaaatcgacgaaaataccgccgagcttcggttcgtcgcgcttgcgcagctccagatgttgcggcgtcatcaccagcgccatcgggttgtcttcgtcatgctccagtccccagcgggcagccagaacagataaggcgccgtctgtggcgcccgtttcatccattaagcagatttgcacgtaaaatcagcctttaatcccgtaatgctccagcatcgcgtccagttgtggttcacggccacggaagcgtttaaagagttccatcggctcttcagaaccaccgcgagtcaggatgttatcaaggaacgactgaccggtctcacggttgaaaatgccttcctcctcaaagcgggaataagcgtccgccgccagtacgtcggcccacagatagctgtagtagcctgccgcatagccgccagcaaagatatggctgaacgcatgtggaaagcgaccccatgtcggtgacggcaccacggcgacctgttttttaatttcaaagagcgtctcaagaattttcgctccttgctgtggattaaattccgcatgcagacggaaatcaaacagaccgaactccagctgacgcagaataaacagcgccgcctgatagtttttcgccgccagcattttatccagcagttccttcggcagcggttcgccggtctcatagtggccggagataaacgccagcgcttccggctcccagcaccagttttccataaactgacttggcagttcgaccgcgtcccacggcacgccgctgataccggagaccccggcggtctcaatgcgggtcagcatatgatgcaggccatgaccaaactcgtggaacagggtgatcacttcgtcatgggtaaacagagcgggtttaccgttcaccggacggttgaaattacaggtcagataagcgaccggcttttgcaatgtgccgtccgctttacgcatctggccgacacagtcgtccatccacgccccgccgcgtttgtgttcgcgcgcgtacaggtcaaggtagaagctgccgcgcagctcgttattttcgtcatacagttcaaagaaacgcacttccgggtgccagacatcaacgtcagtacgctctttggcagtgatgccgtaaatacgtttcaccacttcaaacaggccattcacggctttgttttccgggaagtacggacgtagctgctcatcgctgatgctgtacaggtgctgtttttgcttttcactgtagtacgcgatatcccacggttgcagctcctcaacgccaaattcggctttggcgaaggcgcgcagctgggccagctctttttccccctgcggacgggcgcgtttcgccaaatcggttaagaaatcgagcacctgctgcggattttccgccattttggtggccagcgattcatgggcataattttcgaagcccagcagttgcgccagttcatggcgcagcgcaagaatttcttccatcaccgggctgttatcccacttaccggcgttcggcccctgatcggaggcgcgagtggaataggcgcgatacatctcttcgcgcaacgcctggttgtcgcagtaggtcatgaccggcagatagctcgggatatccagggtcagcaggtaaccttcctgctctttggcttccgcctgggctttagctgccgccagagcgctttccggcattcccgccagctcggcttcatcggtgatgagcttcgtccagcccatagtggcatcgagcacattattgctgtactggttgcccagctcagacaggcgagtggcgatttcgccgtaacgctgctgtttctctttcggcaggccgatgccggacagttcaaaatcacgcagcgcgttatcaaccgctttcttctgcgcggtattcagagtggcgtaatgatcgccgtcgcgcaggtcgcggtacgcgttgtacaacccttcatgctggccaacccaggtgctgtattccgacagcagcggcagcgtctgttcgtaggcttcacgcagctccggactatttttcaccgagtttaagtggctaattggcgagaaaatacgccccagaacatcgtcggcttccgccaacggctggcagaggttttcccagctatacggcgcgccatgcgccacaacgccttctaccgccgcccggcaatcggccaacgctttggtgaccgcaggcaccacatgctccggtttaattgcagaaaaaggcggcagtgaaaaagacgttagtaatggattggtcatatgcgcagtcctgtagaagaaggtgagtggagcgcgcttttggcgctctcgcgatgagatctagaatgggggatagtaaggggaatttcaatgatggacagcgtacagacgtgggtatcgctgcaataagccgcccctttaacatcatcccggcttacgttttataagccgggtgacaacgtcagcgcgtttttctcgccatctcgtaagcagcggacagatccagacgctgccagaactgttgatcctcggtctcgcccgacaacggatatcctgccggtaacgccgtctcttccattaacgcctgacgctgcgctggcgacaggttcggcagcgctgtctgtagcagaacatcggcgccttttggtattttcaacggctgatgctcgcctttctgttgcggcaggttataagtcatggtgaagcggtagaaggtatgcatggccggatcgcggtacggatcgtcttttccggtcgatgccgcgcattcgacaatcgtcgtaccgcactctttcaccagcgcctcacgcagttgagcgcgagcttcgttgaataacgtacggtaatacggatcgttaagataatgcgcgacattacgctgcgcgaccatccgcgcgcccatcacatccagcggatagtgtacgccaaggaccaggcgagaatagccataacgcgcgccacgaatcaccagcgcatcaaagcgttccgggatcatttccgccatcaacagcgcatccgtataaccggtattcgtgtgtccgctggggaaagcaccgccacctgcggtataaggatgaccatcttttaccaccacatcatccggcgtcaaatggatagtattacccggcacctggtaaggacgcgggtaatgaaaatattttttcgccgcgccggtgctgacttccgaggctttaatcaacgccgccgctttgcccaactcacctttatcataagcggcgagaaatgcccgccccagccgcggccccattgcgtcgctcaggaaatagagatactccacgctttccgcatccgccagcgcctggtgacgggtattaacatcggcatcgtgattaatcgccgtcaccgtcgccagattgtctttcaatactgcttccggcaatgtattgaaggcggaaagtagggtaatccccatctgttgattctcagtagtatgaaaatcataaccgctagcctgtaaccaggcattatccgcctggatggaattctgtcgcatctgagccagggcgtcgcgagtcaacgcggcggtatcgccttgtaatgccttacgcaactgtgtcagccattgagcctcaaggtcattaaaggcgacgctcgccgagtcgggcgtcacgcttttcgctatcgactccgcctgggacaggggaatatctttcgccagtgccggcatcgccagcgccagagatgacgccagtacagtaatgtgtagtttcattatggttcctttcattaaaaataacgccaggtcaaaactactaccttgcccacaggcgatgctggcctgcgcagttgacggtttgatgatacgaacacgtcttgcaatactttcacaacgcgcgaaacaacatggcggtactggggtaatctctacggatctgcggtaaactatcggctaacttgtttacttcccggaatatctgcatccatgctcagttatcgtcacagctttcacgctggcaaccacgccgacgtccttaaacataccgttcagagcctgatcatcgagtcgctaaaagagaaagaaaaaccgtttctctatctggacacgcacgcgggcgcggggcgttatcagttgggcagcgaacatgctgaacgtaccggagagtatctggaaggcatcgcccgtatctggcagcaggacgatctgcccgccgaactggaaccgtatattagcgtcgtaaaacatttcaaccgcagcgggcagttacgctactatccgggctctccgttaatcgcccgccagttgctgcgtgagcaggacagtctgcaactcacggaattgcatcccagcgacttcccactgttgcgcgcggagtttcaaaaagacaaccgcgcccgcgtggaacgcgctgacggctatcagcaactgaaagccaaattgccgccggtttcccgccgcggtctgatcctcattgacccgccttatgaaatgaaaaccgactaccaggcggtagtcagcggcatcagcgagggttataaacgtttcgccaccgggacatacgcgctatggtatccggtggtgctccgccagcaaattaagcgcatgattcatgagctggaggccaccggcatccgtaaaatcctgcaaattgagctggcgatccgcccggacagcgatcagcgcgggatgacggcgtccggtatgatcgtggttaacccgccgtggaaactggagcagcagatgaacaacgtgctaccgtggctgcacagcaggttggcgccaaacggtcacggacacacttcggtaagctggatcgtgccggagtaatcacagccatcggtggaacctttcaccttcaggtatacaatcgcgaatattttggcgggtagcgcagaatctatccgtccgacaacgaacataaaggagcggtcatgaccaaacactatgattacatcgctatcggcggcggcagcggcggtatcgcctcgattaaccgcgccgctatgtacggccagaaatgcgcgctcatcgaagccaaagagctgggcggcacctgtgttaacgtgggctgcgtgccgaagaaagtgatgtggcatgccgcgcagattcgtgaagcgattcatctgtatggcccggactacggttttgacaccacgattaatcagttcgactggagcaagctgattgccagccgtaccgcgtatattgaccgcatccatacttcatacgacaacgtgctgggcaaaaataacgtggatgtgattaaaggctttgcccgctttgtcgatgccaaaaccattgaagtgaacggcgaaaccatcaccgccgaccatattttgatcgctaccggcggccgtccgagccatcctgagattccaggcgtggaatacggcattgattccgacggtttctttgcgctatctgccttgccggagcgcgtcgcggtggtaggcgcaggttatatcgccgttgaactggctggcgttatcaacgcgctgggggcgaaaacgcatctgtttgtccgtaaacatgcgccgctgcgcagttttgacccgatgattagcgaaacgctggttgaggtgatgaacgccgaaggcccgcaactgcatactcacgccgtgccgaaagcggtggtgaaaaacgccgacggcagtctgactctggaactggaagatggccgcagtgaaaccgttgattgcctgatctgggccattggtcgcgaaccgtcgaccgacaatattaatctggcggcagcgggcgtgaaaaccaatgaaaaaggttacatcattgtcgataaattccagaataccaacgttgaaggcatttacgccgttggcgacaatactggcgcggtagaactaacgccagtcgccgtcgccgccggtcgccgtctctccgagcgcctgtttaacaacaagccggaagagcatctggactacagcaacatcccgaccgtggtctttagccatccgcctatcggcaccgtcgggttaagcgagccgcaggcgcgcgagcagtacggcgacgagcaggtgaaagtctataaatcatcgtttaccgctatgtataccgcggtaacgacacaccgccagccgtgccgtatgaagctggtctgcgtcgggccggaagaaaaaattgtgggtatccacggtatcggcttcggcatggatgaaatgttgcagggcttcgcagtggcgctgaagatgggcgctaccaagaaagacttcgataataccgtcgctattcacccgaccgcatcggaagagtttgtgaccatgcgttaatatcttgtgcgcccatcttcaagggtgggcgcacaagcctgcatgattaatacgtactgaaataactctggatcagttccggattacgcgtctgagttaatgccgtcatcagcaagactcgcgccttcgccgggttgagcgagtcagacaccagccctggctgccctttatccaacggtacgacgccgtttccggtgcgggaagcgcgcaccacgataatcccggctttctccgcttttttaatccccgcgtcgctgcgtaccgagaccgaacctgcgccggttccggcataaataataccgtccgcgtgatgggcgatcgccgcatcatacatatattccgggtcgtcctgatagccgtaaataatcaccacattgggtaattttttgatattacgtacgtcaaaaacagatcgcagggtatgaattttttccacccgcgtttcgaactgtggctgaccattaacgatgacccccagatagccctcttccggcgctttaaaggtatccagagtcgtggcattagttttcgtcacaaagcgcgccgaaccaatacgatcgtttaaaaccaccatcacaccgcgtcccttcgcattcgggtcagcagccaccgtgaccgcttccagcaggttcattgcgccatcggcgctgattgccgacgcgggccgcattgcagcggtaaacaccaccggtttgtcgcttttcacggtcaaattaagaaagtaggcggtttcatcgagcgtgtcagtgccatgagtaataaccacaccgtcaacatcgtcccgcgccaataacgcattcaccttctgtgaaagtttcaggatgatatcgctggtcatattttcgctaccaatattcgccacctgctcgccgtcaacgcgagcgatattattcatttccggcacggcatttattaatgtttgcacgccaagttcaccagatttatatccggcggtttgcgtattattggctgccgtcccggcgatagtaccacctgtcgcgagaataacaatatgcggtagtgacgttgtgctaaatacacagtggctgatgagcagcaacacggtggccatgaaaactctaattttcattttcttcctctgaattaaaaataataagtggcgtgtgctataaaaacatgaataacaatcaggccagaaccatttttcctattaacagcccgacaatgaccgagacaatcacgttaactaatcccggacgcataaaactatggttaagcacatatttgccaatacgcgtcgtaccggtatcgtcaaacgccagcgccgccagacactgccccgccaccggaataaagaaatagccgttaacggcaggccaggagccgattaatgcataagcgggcaaccctaacgccagccccagcggcaacagaattaacgtcgttgccgcctggctgctgaccatagcggacacaaaaaacatcataatggcgataagccaggtatgctgttgcaatagagtttgcacttctgccttaatcaacgcgatatgaccattcacgaacgtctcactcatccaggccaggccgaaggcgcagacaatcgccagcgcgcccgcccgaaataccgtaccgctgataatttgatcgacctgcggtcggcataacaacacaatcaggcaggcaaaagagagcatcgtaatctggatagcggcggacatcgaaagcggttgtagccctttcgctgtttccaccatgggccgcagcgccggaatcagtcctaacagaacgataacgatcgcactggtcagaaataacgccaccgacaatttggcgcgcgaagtgaccaccgtatttttactttctttctgcgcaggtttaattaacccttcagcaagccgacgttgatattccggatcgtcttttaactcttttcctttattaaaggtcgctattgcccccatcgctacgccgattaacgtggcgggcacgcaaatcatcataatggttgaaatagagacgcccaacggcgccattaaaccaatcatcgccgccatggcggcagatataggactggcggtgatcgcctgttgcgatgcgataacggaaatagataaaggacgttccggtcgaatacctgaatcccgtgcgacttcagaaataaccggtagcaagctataaacgacatgccccgttcctgacataaaagtgaagatataacagataaacggcgctaataacgtaatgtaacgcgggtggcgacgcagaattttttccgccagtttgaccagtaaatccagcccgccggaggcctgtaaagaagcggccgccaggacaacagaaagaataatcagaataacatcaatcggtggcgtagaaggcgtcaggccaaaaataaaaaccatcacgccgacgcctaacccgccgaccatccctaaaaatacgccgccgatcctggcgcctatcatcagggccacaaggataaaacataattccgtccaaaacatacttcctcctgggttatctggagtgagtgtcgctttacattgagggacgtaacctattgtgcaaacggtttaccaaaaccaaatgcgccgtaatgagataacacctgcgccgccgatttcccgccctgccgcatggcgcgtaacacgctttctttatcgggttccgccatacccgattgcaaaatggaaagcaaaaaaccggttaagaaggcgtcgcctgcgcccagcgtatcgacaggttcgatataagcaggttgccactccagataatccgcgccggaaaaataataaactttttcatgcccgcaggtggcaataatatgccgacagccataacgataaagtttattgagttttactttgatttcatctggcgataacccgctacaggagataaatccgtaatctacccacgggcataccttttcaaaatagtcgtctgtaccgcgcccggaaaaatcaaaagagagtaagacggtttgttgtttaattttctccagttccgattccaggtggccgttaatactggaatggactaaggtaaattgtgatatatagcgaagatcgtcgtcagacagactaaaaggatgttcccgcaatacgccgtttttgttgctggcgacaaattgccgatcgccatgcgagagacggatacaggcatacccattttcgccggtataatggcggctgtgagagatgtctatctgtagctggtgtaatacatcctgtacgtgctgcgcggcgtcgtcattgccaaacgcccccataaacgcgctggggatgtctgctaatttcgcatagacagcaaaatttaatgcattaccgccggggtacatgatgccggaatgcaggtatttatcgacaacgttgtcgccaatacccaatacgctgatgctcatcattattccttgtttgtctttacaataaaaagcgtccctgcttttttatccatcctgatgtaattaatattccactttccacatatagcggcgcgtcgttaacggatgctgacgcgcctcagctaacgcccgattgtaaacgggataaacgttattaaagagagagtggttaaagtaatcaataaccgtggttttaatggtcgatagccccagttctttcgcatcgacaacttcaatccggcggccatattttttcaggaagtttaacgcgcgttcatccaccgcccgcgtattgccctcggaaaactggaagaagaaaggcgtattcgcatcggtaatttcaaacggcccgtggaaaaactcaccgctatgaatacaggcggaatgtatccattgcatttccataaagatgcagatgctctgtaggtaggctgcgccatagcccgcgccgctggcgacggtataaatgactttatcgtctttatattcctgcgcgaacgcctgcgcacgctccgctacctgctcgcaagcgcgccagacgatacggttgattttgctgacgccatcctgaaaatcgtcgtagtgcgcatacccttccgtctgctggagcagttcgaccgcactcagcaggcctttcatcgttttctctccggcaatatctttaccgtcgccaaacgtgtacgtttccacatagtcgcaatgcgccaccaacggtgaatccattatccaggttaaaccaatgaccggcgcgccgtgctgacgggcgatttcagccgctttaattgtctctggcgtattacctttgtgggaggcgacaaccacaacggcattttctcccagcgctaccggcgggttgttaataaattctccgctgttatacagaccgacagtcaacgctttcgcttctttttctaaaaatgctttcgccggatagaacgccgcataagaaccgccgcacgccacgtaatagacgtgtttaacgcctcctttctctgcctggctggtcacaatattgctaactgtctctttcatacccatcatgctttcctctggttccatcaatgatacaggcgaggattcgccataaatgactcataatgtattattatttttatatgacatttaaagacatttgatcaagatggaaaccaaaaaaaatcgggatccgcgatctggatcccgattcagcctgctcttcgttagcgtaatgctgacatcatacggtaaaccgtattttatcgccgacaatcaactgttgcgaaacgcaggagagttctcctttgttatcaatcatttcactttttatcaggatcagcggataaccctcgttgacgccaagataatgggcgacttcaaagctggcataaaccagttcgatcatcttacgggagtgggtaaaccataaatggtatttctcgcgtaagcattcatacaaagagtgattattaagatcttcgtccagcaaaaacgcaaaacgtgggggaagatgtacggtttccagcgataccgccacatcgtcggcatagcggatacgttcaatgacgaccgctttttcgccatcgttcatattcagtaacgcttttgtctcatcgtctaccgattcaaaaacggatttgatggtgcgtgaccccgggcgacgtccctgggactggcataactcgctgaaactcatgatgccggtcatgctgcgctgaaatttctcaccagagacaaaggtgcctttgccggagacacgggtcagcaaattttcacgcgtcagcgcatccagcgccttacggaccgtgaccctgctcacctgccagcgcacgctcagttcattttccgtcgggatctgctggcctggtttatactctccacgcgcaatagcctcttttaaggcggcttcaagctgcttataaagcggtttggcgcttttactgtcgggttgctcgatcatttgtatccatttgtattatcatgatgccatagcttgtattataactatttacgttacctttgcttgtgaatccacgccatgcggtgacgtagtgataccgctatgaaacgaatgttctgattttaggtctggggcgggcgtcatgaaaataggattttcgcaatactattcagtaagttatgaagtgtttttcttgagagacaaattgcaaaatgtgatctatcgcacactttgccactcaggtatcgaagcgaatgtctacgcttaatagacagccgggcaacacccgtatcttttacgacgcaagccggaggtccttgtcattatgctcaaccagaaattaaaccccacgccttctgaagatctgactattgatgtcgatctgctttatgaaacagacccgtgcgagttaaagctggatgaaatgatcgaggcggaaccggagccggagatgatcgaggggcttcccgcctctgacgccctgacccctgccgatcggtatctcgaactgttcgagcatgtacagtcaacaaaactgtttccagacagtaaaacgttcccggactgcgcgccgaagatggacccgcttgatatcctgatccgctaccgtaaggtcagacgccaccgtgattttgacttacgccgcttcgtcgagaaccatttctggctaccggaaaccttatccagcgagtatgtctctaatcccgaaaactcgctcaaagaacatattgaccagctttggccgatactgacgcgcgaaccgcaggatcatattccgtggtcttcgctgctggcgctgccgcaatcctatatcgtgccgggaggccgttttagcgaaacctattattgggactcttattttaccatgctgggtctggcggaaagcgggcgcgaagacttacttaaatgtatggcggataatttcgcctggatgattgaaaactatggccatattcccaacggcaaccggacctattatctgagccgttcgcagccgccggtttttgccctgatggttgaactgttcgaagaagatggcgtgcgcggcgcgcggcgttatctcgaccatctcaaaatggaatacgccttctggatggacggcgccgaatcgctggcgctcaaccaggcttatcgccacgttgtgcggatgccggacggttccctgctgaaccgctactgggacgatcgcgacacgccgcgcgacgagtcgtggctggaagatgtcgaaactgcaaaacactccggtcgtccgcccaatgaagtctaccgggatttgcgcgccggggcggcgtccggctgggactattcttcacgctggctacgcgatgcgggccggcttgccagcatacgtacgacccagtttatccctatcgatttgaacgcttttctgtataaactggagagcgctatcgccaatatttcagcactgaaaggcgaacgtgacaccgaggcgctatttcgccagaaagccagcgatcgacgcgccgccgtgaaccattatctgtgggatgatgaaaacggctgttatcgggactatgactggcgacgcgaagaaatggcgctcttttccgccgccagtatcgtgccgctgtatgtcggtatggcgaaccacgagcaggccgaccgtctggcaaatgtggtacgcagccgtctgttaacgcccggcgggattatggcgaccgaatacgaaaccggcgaacagtgggataaaccgaacggctgggcaccgctgcaatggatggcgattcagggcttcaaacggtatggcgacgatatgctgggcgatgaaatcgcccataactggttaaaaacagtgaaccatttttatcaggagcaccataaactgatcgagaaataccatatttccggcggtacgccccgcgaaggcggcgggggcgagtatccgctacaggacgggttcggctggaccaatggcgtggtgcgccgcctgattggcctttacggagagccttaacctgctccggcctcagtgaatcgcatcataaatggctgactgaattttcagccattttttattgtctgcgctgggccgggcctgagcgcgcaatcgggcctgctccgtatcgtgctgctggcgcgtcacaacagccggaacggtgcaaaacgtttgcaaataggttttatgcatcgcggtcagcggcgcgccgctcgacatgtcatgacttaacgttgtgataaatcgtcggcagggtttgacctcatccatcagcgcgggataacgcaacaacagttgcagcacctcggtatgtcctgccgcaaacgcctgctccgtccacgcgagctgccagttcattccgccctggaggaacagcgccgtcacccgcgtatcattgcgctctatcgccgcccgcatggtaaacgcatcccaggtaatccccatatgattgagcgtttcccgcgcggaaggcgcctcgcgcggcggttcatcctgcgccattgcgggagcttgcccgttatcggagcctggcgacgacgaactaaatagccagaacgcgcccgccagtatcgccagcgtcatgacgccaaccgcgccccacaaagcgccggaaataagttgctcacgctcttcaggcgtacgcggaggccgcttacgcggtggttctatgctctcgctaatctcatgcttatctcccccggcctgccgatctttaagccgcgcggtttcccagaactggcgcaattcacgttcatccgccagcagaaacgaagcgggattcacgcgggtacgtttttcggcataggcgcgctggatgggccgaacgatttgctgatactgaacgtttagcagcataagctgcgctgaggtaagcggctgcctggcgataacctcgtttcgcgcaaggcggcaatcatccagaaacatacgcagagtggtgcgcgactcggcgaacagcgttaacgctgaggcatcattaaaaattctgacgtaatgacgggcaaacaattttttatcgaccaccataagcgccagttcgctgaacaacatgccctccagcgcatgttgatcttctccctgttttaaccactggcgcaaacggtccgggccgaaatgttgcttgaggtagtgattcagcgacgcccgatccggccatgcgcgcgcaataagcgcttttaacgtcagttctatcgcccgaagctgacgctgcgcctcaagatgcgcctcctggtcgggttcttccagctcagtttgatacgtcagtagcggctgctgctgacgtagatgctccagcgaggtgacaaaacgcaacgcggcaaggagttgattttcgctcacctcttgcccgctgtcatactggggaacatgctgctgaaggtgacgcagttgcagcataaactggctcaactgcgcgtcatttatccgcaattttttcgccaccgcgccccaaccgcccaggttaagacgcgcctgctcaagttgttccatgaaccaccggggctcttttccctctgtggtatgaatacccagcagcagcaggatttctattgatgcctggcggataatccccaggctatgttcaaaaggcgcgcgtgtcgcctgcgaagcgctattcgtcattatcttccctaaaaagacgatcccgcgacgagatcttcgttttcttttaattatgttttttcatagatataacagatttagccacatttcagtgacttaatcttaatgattgcaaatttataagaagatcggttactaaccaaaaacatcagtttttcattctgtcaacgcggcgtgacgctgaacggcatagaccttttccctgcctgcgtttggccgtctgaccgctagccacgcgtgcagcacactttataatcgcgctttttatgagaaagatgccatgccgcacatttcatctcgctttagctccgcctgcatcgcgtttattaaacagtggcagggtctgtcgctggaaaagtatcgcgatcggcagggtaactgggtgattggttacgggcatatgttgacgccggatgagacgctgacgttcattacgcccgaccaggcggaggcattcttgctggatgacctcaatagctgcgatattctgctacagaattgcttgccggaacttaacgatcggtttcaacgcgaaacgcttattgcgctgatgttcagcatcggacatcagcgttttttatcattaatcaatacgggtgatatttcacagccagaaataagcggactgcgaatttaacgtcgttaattcgattcatttaacatcatggcggcctgggtacgattttttacatccagccgccggtaaagcgactccagatgcgctttaaccgtcccggtactaatatttaacgcccgcccaatttgtttatttgattctcctgcggcaagcatctgtaaaatttcccgctggcgggcgcttaacgcttttatatcacgggactccagctccgttgaatttaaccaatcccccggtaaaaacatcatcccgcgagcgacagcattgagcgcaaggacaaaggtttcagcatcagaatcgcgtggcaccacggcctgaacgttaaattgcatgacttcatgcagccacttttgactgccatccatcgccgtgataataatcttcacctccggaaattgctgcgcggttctttgtaacacctcgcggcaaaactcagcatccaggccgctatccagcatgaccagcgcatccggcgcgctttctattttttgccagagttcttctgcctgaccgacactctggatacttattcctggaatgtgctgctgcaaactgattttcattccatgaataaatattgactgcctgtcaaacatgattacctgcattacttttctccacctgggtaagataatagtctcaagatgaggaagggtattacccgtagggtaaaataagaagtcgccatttggtataggccattttaccgatagtcattggttgaggaagggaaaggttatgaatatttacagcttcaacatcgggattacagaattcgctaaaattagccttttaaagtaaggaatatcttattagcgcgaacagctaaggctaatttgaatattaatttaatgaagagtacgcctggcgcgtcacaaaggaaatatctgcttttcgcctgatgtgttacaaaaaataaagtagcacattttgttaaaaaatagccaatccgcctgaaaaccgcgacgatgggtcaatgacaataccgtgtatgtacatgcatttctctgccccactgcacccgctgttatcggcgtgttttaccgccctcgccccgtttatcggctttttggcgctaaaatgcctggccggaaggcgataaatccgccgcgcaacgcgatcagacgtattcgtcacgcgagcaatgattgcgaaagggcttattaggtgctagaaaatcaataaaaccagccgcttcagcgtcactgtttcaataagaacaataatagagcctgatgatggataaaatatatgcaatgaaattgtttgtacgcgtggcggaacgggaaagtttttcccgtgcagcagaggatatcggccttcccaaaggcagcgtctcacggcaaatacaagcgttagaacatcaactgggcatccgcctgctccaccgcaccacccggcgggtacagcttactcaggacggaatggtttactacgaacgggcaaaagatctgttgagtaacctggatgaactggagggtcttttccagcctgatcccgccagtatcagtggcaaaatacgggtagatataccgccatgtctcgcaaacagcctcatcatgccgcgcctgcccacttttttgcatcagtatcccggcattgcgctggaactttgtagtagcgatcgacaggtcgatttactacgggaagatttcgactgcgtggtgcgcacagagccgctacatgcgccagggatactgacgcgcccacttggcaaactgaggagggtgaactgcgccagcccacaatacctggcacgctttgggtatccagaaaaccttgacgatctcgcctcacatgcgatggtgcattattcattgaccccgggagtctcttcaccgggttttgcctttgaaactccccacggtatgcagtgggtaaaaaccggcggaatgctaacggtaaacagtacagagacctggcatacggcctgtctggcaggattaggaatcattcagacgccgcgcattgctgtacgggaggcgttacgcgccggaacgctcattgaaattttaccgcaatatcgcgccgctccactgccggtgacgctgcattatccccatcgccgtaatctttcccgccgggtacacctgtttatggtatggctgacggaaaccattaaagaggccgcagagtagccgcattttcagcatccaccggggagaagctatactgacatattctattaatgatgaaggactaccgacctgatgacgcaggaaaatgacgtaaaacgccctattcaggaactggagcacgacccgatacaaaaaatagaaacgcagccgcatgacgccccggaaaaaaacgaaaaggcaaatcaggcgttgcattccgtcaccaccctgatgcaaaaaattcagcgtcaaccaatggtggcccacctcattcgcgcgaccgaacgttttaacgatcgactgggtaatcagtttggcgcggctatcacctacttttcgtttctgtcgatgatcccgataatgatggtgtcctttgccgcggcaggttttatcctcgcctcgcaccctaatctactggaagatattttcagcaagatattgatgaatgtgagcgatcctacgctggcgtccacgcttaaaaatacgattaatacggcggttcaacagcgtaccacggtagggctggtcggactgggtatcgcgctctattccggcgttaactggatgggcaacctgcgggaagcgattcgcgcccagtcacgggacgtctgggagcgcaagccgcaggatcaggagaaaatctggctcaaatatctgcgcgattttatctcgctgattggattattaatcgctttaatcattacgctgtccattacttccatcgccggttccgcccagcagatgatcatctccgccttgtatctcgacagcatcgaatggttaaaaccggcctggcatttgatcggtctggccatctctatttttgccaactatctgcttttcttctggattttctggcgactgcctcgccatcgtccccgtaaaaaagcgttgattcgcgggacatttattgccgctatcggttttgaggtgattaaaatcattatgacttatacgctgccgtcactggtgaaatcgccttccggcgcggcgtttggctccgtactcggtctgatggccttcttctacttttttgcccgcctgacgttattctgcgcggcctggatagccaccgccgaatacaaggacgacccgcgaatgccgggtaaaacgcaacgctagtctgcggcttgctgccgaatggcacgcacggcgtcgtcattcggcctactgatgtgtagacccaggccgggcaagcaaagcgtacccggcggtacaatcaggcacgtccttccgcctcatctcattgtttcagcatataaatccagtaattaacttttatttaaccagaaaccagttttatccaccaattctaaaattatgtgaagcatttcatagacgcaaaatggctggcttaaacattatcccctttttgcgctttttttgaccatttttagcttttgttacacattgaaatataacttttgctgtgcgtaatatggctattcgttcgctaaaaataagaaaatagtatgcaagcaaccgccacaacactcgaccatgagcaggaacatgttccggtaaactcacgcaataaagtcgttattgcctcgcttatcggcaccgcgattgagttcttcgacttctatatttacgccaccgcagcggtgatcgtgttcccccttatcttcttcccccagggcgatcccactgcggcaacgctacaatcgctcgccaccttcgctatcgcgtttgtggcgcgtccgattggctctgcgctattcggtcacttcggcgaccgggtaggccgcaaagtcacgctggtggcttcgctgctgacgatggggatctccacggtcattatcggtctgttaccgggctacgcgacgataggtattttcgcgccgctgctgctggcgctggcgcgtttcggtcagggactggggctgggcggcgaatggggcggcgcagcgttattagcgacggagaatgcgccgccgcgcaaacgcgcgctgtatggctccttcccgcagttgggcgcgccgatcggcttcttttttgccaatggcaccttcctgttgctctcctggctgctgaccgacgagcagtttatgagctggggctggcgcgtgccgtttatcttctcggcggtgctggtgattatcggcctgtatgtgcgcgtgtcgctgcatgaaacgccggtgtttgcgaaagtcgccgcagcgaaaaaacaggtaaaaataccgctgggcacgttgctgacgaagcatgtccgcgtaaccgttctcggcacgtttattatgctggcgacctacacgctgttctatatcatgaccgtctattccatgacttacagcacggccgccgcgccggtggggcttggcttgccgcgcaatgaaatactgtggatgctgatgatggcggtgattggtttcggcgtgatggtgcccatcgccggcctgctggcggacgcatttggccgtcggaaaagcatggtcatcattaccacgctcatcattctcttcgcgttgttcgcctttaccccgctgctgggttcaggcaatccagcgctggtattcgtgttcctgttgttaggcctgagcctgatggggctgaccttcggcccaatgggagcgctgctgccggagctatttccgacggaagtgcgctataccggcgcatcgttttcctacaatgtctcatcgattctgggcgcttccgtcgcgccgtatattgccgcatggctgcaaagccactacgggctggcggcggtaggggtttacctggcgtcaatggcggcgctgacgctgattgcactgctgttaacccatgagacgcgtcatcaggcgttgtaatagggcgccggatggcatcatccggcgctacgtttcacgttactgcttcatctgcgttaaaatcgtccggcactgattggcttcgccttcagagggcgaaattagcgccaatagcgcggcggcgggcgttaccaacgtcgccagcgctgccgcaaccgcgccgcgcgcaatcagcgggccgggcttgacgcccgcctgcggatttttaaatgtcccgcgcacgtacagcggcgatcgcagcgtaataatacgaatccccttactttccggatcaatggttaaatcgagctgttcagaggcgaagctcgccgtaccggtcacgttaatcaacgcattttctgtatcaaaagcaaaaatttgcggtcgcgccacgccgttcgtaatattgagattcgccgccgcgcagttaacccgcacttcgtcatcgccaaaaatctgcccgacaatatagttgccgacgttcagccccacgatttccatcaggttgcggctaatcaatccatcattcatcaataacttcagattgccgttactgttgccaagcagcgcggcgaccgagttgcccgtcccgcgaatatccgcatcgccgttcagctcgcccagcgttttctgcatcagctccacatccggcatcagttctttaagcttcagccgacgcgcctgtatatccgcccgcccctgcattggctttttatccccttccagatggatgttggagacaatactgccgcctgccagaccaaacttcagcggctgtagacgtaagtcggcgtttttcaggatgatatgggtcgaaagatcgctaatcggtagactgccgccatgttcaatacgtcggcctttaaaccggacatcggcgtccataacgtcccatttgtcggtttcaaagcgatcgtaaggcaacactttatccgccggctgaacattcttctcgcctttgcgctgttcagaccgtttcgactgctcagcgtctttcccggaatccacgccaatcagcggcccaagatcggccaggcgtaactggcgcgattcgacatcgccttccagtttagggcgcggtttaccggtggtataagtgagggagccgtggatatcactgtcgccaatgcgcccgttaaaaccgcgataatcaaatactgatgacttttcggcgtcaattttcgccaccaatcgcccatcggtctcaaacggcggcgtatccggcagcagcacgccggttaaatcatataaatcgcccagtgaatcgccagagaatttaagccgcagatcgacgccgcccattttcatcggttcgttcaccacgccgctaaaagccacccgcgtattaccagagcggaaatcggcctgcacaggaaaaggcgtactttcgctgcgtagcgccagcataccgcctattttccccgtaccggtcaacggttccccgttataacgcccctgcgccttcaggccgaagacatagtcgcccacggtggatttgtctgctttgcctttcgttcccgtcacttcgctgaacggcaacggtttgcctaacggatcgatcagaatagtgatatccgccttgctgaccttatcatcgatcgcgattcgcccctggtcgaagagaatattatccagccggaaggaccaggcggaaggtttagcattggggtccgtattcttgtcttgcgcgaggttaaaggtccagttattggttttctcggacagacgaataagacgcgcgtcgggtttcaccagtttgatccacggcagccagacggttttggtcaggagcgccagtggggcaagcgtcgcctcaacgcgtggcagatgcaccatcgtgacttccggaatatctggcggattgccgagaatgacgtcttccgcgtgaacatgcggccacggtacccagcttcgccagccggtctcctgtttttggcgttcccacaccacgcctaaatcgccgcgaatagcgaaaggccggttcaattcggtagagactttctggttgatggtcggtttgaggcggttccagtcaaatgttgcgatcaacaaaatcactatggcgatcaacaacaagaaagtccctgtgatggcggcggttattttgcctgctttagtcatgtgttatttcctcacttcttcccttgcctgtcctaaagatagttcagccagacgaaaaaggaggatgaccgcgcctcgtaataccacgtattacgggaacagtctggcgttacagggtcagaatcacctcttcgagcgatatcagcggcacgggtcgagaaagaaaatagccctgggcggcaaaggcgggcgaacgctgcacatcacgccactcttccagcgtctccacgccctcgacaataacgccgcggcagtagcggttcatcagttgcagcagcagagtgaacaggttgcgtccctccggggactgacgcagcatgacgaacagctcgcgcgccactttaatgtagtcataacgcacttcgctcagcgctgaaaaattggccataccggtaccaaaatcatccagccacagcgggccgaactcacacatcgaggcgaaagaggagtctttcggcaaacgaatatgttccaccagttcgaaacgcagccagggtaagcgctccatcgctgccagaatgtccggctgtcgtcgcatggcaatcagcgtagggccgtcgacattgaccgatgccaataagtgatggcgagtgaaaaaatccgctttttgttcgagctgatgaagttgttctttcactacgtcaatgcggtgtcgaaccgctaactccgcgaaataacgatccggggcaatacgtctggaagggttatcaggatgggtgacgacagtgagaagttcaaccgccatcagacggccatccgtctggtatatcggctggtaagtataggcacgctcgcattgcagccaatagcgccgttcctgcaaattctctatacctgcatcaggaacgcgtagctgctggataacctgctttatcatctcagttgtcctgttaatgggagtgtgactgtccggactcgtcaaaggttatcggcgttcaggcagagaactttaccctcggtccctggcaaaataaaaacagcccccgaaacttgtcaaaaatacgcacttgctcaaaaaaataatggaccgatgttttaatattattgaccactaaacatccacagcgcacactaacgctaatttttacagatcaggttcacgactatgtctaaaaagattgccgtgattggcgaatgcatgattgagctgtcgcagaaaggcgctgatgttcagcgcggcttcggcggcgacacgctgaatacctccgtttatattgcccgtcaggtcgattctgccgctctggccgttcactatgtgacggcgctgggtaccgacagtttcagccaacagatgctggaggcgtggcagcatgaaaatgtggatacctcgctaacgcagcggatggaaaatcgcctgccaggcctctattacatcgaaaccgatgacactggcgagcgtaccttctactactggcgtaacgaagcggcagcgaaattctggctggagagcgagcagtcagcggctatctgcgagacgctggcgaccttcgattatctctacctgagcggcattagcctcgcgattttaagcccgaccagccgtgataagctgctgtctttattgcgtgaatgccgggccaacggcgggaaagtcatttttgataataactatcgcccgcgtttatggacaagtcgcgaagaaacgcagcaggtctatcaaaagatgctggaatgtactgatatcgccttcctgacactggacgatgaagacgcgctatggggtcagcaaccagtggaagaggtcattgcccgcacccatgcggcaggcgtgcaggaagtggtggtaaaacgcggggcggactcttgcctggtctcgattcagggcgaggcgctcattgacgttccggcagtgaaactgccgaaagagaaagtgatagacaccactgccgcaggcgactccttcagcgccggttatctggccgttcgtttgacgggcggcagcgcgacggatgccgcgaagcgcggacacctgacggccagcacggtgattcagtaccgtggggccattattccgcacgacgcgatgccgcagtaagtcattcgctcttgcccggtggcgctgcgcttaccgggccgacaggcggcagcttactgtgccgccggtgtctccgtcacttccggatgcgcctcatctgcttcaacagcggcggcagtagtcgggaccatgatttcatcccacgtcgcctttaacgccttcatattaaattccggctcgccttgcggttgcagcaaaattaatgccatctcctgcgatagctgctgacgtaaattctgattgagcatatcaacggtcaggctgttgaggaaattctggcgcagcttctgatactgctccggcgcgatatccaccacttgattctgcagcgagcgcatacgctgtccagtcaaaatgtcagtatcggtacgcgcgtaggtcgcgaacagcttttgcaattcgagatttttctgcgccaccagcgcagtaaactcctcttccgacaaacctttgtcgcgtactttcgccagttcattcgccaccaggctcaaattggtattgagcttatcattaggtgattcaatgttgatggcgcactgcgcgcgcagaaacagaacccggcagtcaaaccccagaccaatatctttcgcgttatttttagtaagctcttgctggatatgccagaacagcgcttcgcgcgccagatccgcctgccagtagcgcaacagcgccgccgactcgcgaatcggttgccacggcgtatcccacataatggagagacgatcctggcgcaccgcatcggtcataatgctcactgattccgcccgcagcggcgaaagcgtcggcaccggggcgggcgtttcgcgtttacctttcagcgtaccgaacgttttattgatctgctcggcgacggagcgcgcatcaatgttgccgacaacaatcagcgtcatggcatccggggtgtaccatttttcatagaaagcctgaattttggctgcgtctaccggctgctttaacggttccgcgggatcgtgccccaataacgccgaccctttcagccgataacgccaccagccctctttagtatctgctggccacgtcgcaaccatatcttcgctgcttaacgcatgattcaccgtctctggcgtaatggttaatttaccggagacgttagccagataggtcagcgcttctttcagcagatcgttacggttattgggtaaactgaggttatagagcgtggaatcataagaaacaataacgggcggcatgggacgtttcggatcaaacccttgctgccataaagaacgtgcctgtgcggcatccagaccaccgctttgcgtcagcgcgatacggggaatcgcatggctgaacccgctctgttgcgtactttcggtgagcgaaccggtattaacctggagacgaacttcaatacgatcgctggggcgctgaggcgtagccaacacttgccactgtaacccattagccagcgtcccctgttgccatgccggatcgggctggagcgcatctgcctgcacatagccggcagaggccaacatcaacagactgcccgctaagagtcgaatttttgtgccctgcatgtgaacccctgatcaacaatcctggtaataaaaagacagccccggcagggatgcctgaatatgacgtaaaaacacttcgtgttagaccgcgagaacctaaaaatgtcacggaagaagtgaaataatccctaagcatcatgctgtatgctttgggcgcaggggtcaattatgcgcaaacacccgcagtcctggaagggactacgggcataagtggcgagattaggaggaaatttcgtgcgttttgccatccggcgcacgattattaagcacatcgtccagcttttggtgatctaactctttcacccatttggcaaccaccaccgtcgccacgccgttacccaccaggttagtcagcgcgcgcgcttcggacataaagcggtcgataccgaggattaacgccagtcccgcaaccggtaaatggcctacggcggagatagtggccgccagcacaataaagccgcttccggtcacgcccgcggcgccttttgacgatagcagcagcacgaccagcagcgttatctggtggaagatatccatatggctgttggtcgcctgggcgataaacaccgccgccatcgtcaggtagatagaggtgccatcgaggttgaacgaataccccgtcgggatcaccagccctacaaccgacttacggcaccccagtttttccatcttatcgagcatacgcggcaacgctgactcggaagaggaggtgccgagcacaatgagtaattcttcccggatatagcgaataaatttaaaaatgctaaagcccgttacccgtgcaatcgtccccagcaccaccaccacgaagagaatacaggtgatatagaagcagataatgagctgccccagttgcaccagagaaccgacgccgtatttaccgatggtgaaggccatcgcgccgaatgcgccaatcggcgccaggcgcatgatcatattgatgatgccgaaaatgacctgcgaaaaactctcaatcacattgaaaatgagctggcctttgctgcccaaacggtgcagcgcaaaaccaaacaacaccgcaaacagtaagacctgcagaatgttgccgctggcaaacgcgccgatcacgctacccggtatgacatccatcaggaaggcaataatgccctgctccttggcttgtgcggcataaacggccaccgcctgcgcatccagcgttgccggatcgacgttcatcccggcgccaggctgcacaacgttgacgatgataagaccgataatcagcgcaatcgtactgacaatttcaaagtaaagcagcgcgaccgcgccggtacggcccaccgctttcatgctttccatgcctgcgatgcccgtcacgacagtacagaaaatgacaggagcgatgatcatcttaatgagcttaacgaacgcgtcgccaagcggtttcatttgtgcgcccagttcaggatagtaatggccaaggagaataccaatggcgattgctgtcaggacctgaaaataaagacttttgaacagagaggttttcatagggtgtccttgaagtaaaaaccacaggtcttgtaaggttatgagtaacctgcggccttaaaataacacccacacaacatgacagaaatgcgccaggatcataattgaaacaaaaatgttaaaaagtttgagctggctcgcacaagcgcgaccttttttaacttttgtaatcaggattttcgtgcgacagataccgttcttcaaagatatccgcgggaacgggccgagcaaacaggaagccttgcgcgacgttgactcccgcctgttccagccacgcgcgttgcgcctcgttctccacgccctcggcaatcaattgtaaattaagactgcgggccatcaggataatcgccgtcaccatactgtgatcatccggtaacccatcgacaaacattttatcaattttaaggatatcgaccggtagcgacttcatatgctgtaactggcgcagccccgcgtaacccatgccaaaatcatccagtgcgatacgcacgccagcattacgtaacggacgtaagatagcgacggcagcgtgtggatcgtcgatacggcggctttcagtgacctcaagaatcagcgtacccggttgaatacgatagcggtttaacaattccagcagatccgacaccatgccagggtgcatgagctgtaacgcggaaagattgacggagagcggcaatgtcacgccgcgctcctgccaggcggcaagctggcgacaggactcttccagcacccaatagcccaccgtgaccatcaggccgcaggattcaatgcgctcaatcagcccctccggtaattcccagctaccgtccggctgctgcatacgtaacaaggcttcggcgcttaatacgttgccgctgcgcatttcgacctgcggctgcagccaaatggcaaactgatggttatccagcgcggtaaggatatcgctctcttcggtaaggcgctgttgagcggcctccatctgcgccgggtcaaagaactggatctgatttttaccttttcggcgcgcggtaaacgcggcggagacggcgcgaccatagagcgcttcggcggtcagatcgccataatacatcgcaatgccaatactgcagcttgggcgcagttgaataccctggatgggcagtcgttcattaatgatagtgagtatttgctgacctaatgtgatggcgtgccacggctctttaacgccgtgggcgataatggcaaagtcatacccgctgacctgcgtaagcaccatgcgcggcgccagcaccgacttcagcttctcaaccagcgtcagtaatagaatctcccgctgcgtttcttgcagcacgcctgccgtgtcacgcaacgtttcgcacgtcacgatgataagcgcggtggtctgttggcgggtgataacctgttccagcaatgccattaaaaaggctttattgggcagctcggaaaccggaaaacgcatcgcgttgtccgtttgctcctcgcgttgacgctgcataagctgctggttgaggttatagctgcgcaccagcatcccaatttcatcatcctgatgcagacgcggcaacgccagctgatgtccgatcagctcctgctgcggaatgtcgttcagctcgcgggcgattttgcgcagcggatgcacaatcaggcggtttacgcaccaggcgatggccaccgtcaggatcagcgataaaagtaagtaaatggtcactaacgtagagagcgcgctcatgacgaacttgtacatacggtacgaatccgcctgcaatacaaggtaggccagcggttgcggattggcaggacgctccaacgaataaaccggcaaagaaatttgtaccggcagttcgaagagacgcgtcaccataaccgggacggggcgttcaggaatgaagcgcttacgcaacgcctggaactgattcggcaataccacatcggcgcgactcaccacgcccgcaggtttaatactttccagaatggtttccgcgccggggagatccgcttttaaaatcgcggaagaaagaggttcccgaacagatcgcgcgatgctttccagttgcgtagccgtgttgtagcggttctgctgtaccagatggaacaacaaaacggtgcaaaagacaaaaacaaacatcatgacaacggccgcaaccattgccatctgtttaattgttaacgagcggctgacgcgcaaattgactctccctggatatcccggactgccgcctgagtatacccgattgcagcggcattaagagaggctgtatctgaaaaggacttttctgaataacggttaatgatagcgtctgatggcgctgcgcttctcaggcctacgacgcctgtcaattcgtaggcctgacgcaatgattaccagtcagcgtaaggcaccagaggctgcggcggtaaatccatatccccctgccagcccgccgcggaataacgaacatacagcagcagatgactgggggtatagtctttcgcctgctgaatatcgacagccgtacccacaaaccagttggcagtgacccggcgttcaatgagcgcccgcgcggtatagccaaatccctggctgctgccgccgccgttggtctggtcacgcgcatcctcctgataatctgccgggatcaaattcatcagcggataacgcggcatggtacggttgcgggagtgcgaccaggataccgagccgcctaactcccacgaccagttttccgtacgctgccgccacatcaccggcaccgcaaacgacaggtattcctgcgggctataataaccgccctgacccagtgaataaccgctcagatctttgtcgtaatgccagatcatgttattcagcccgacggtaacacggcggttattctcgttaatcaccttatagtaataaccggtcatccagcgcacgcgccagttatcttctacatttttaccgctcaactggtcgccgctgagcgacgcccagacaccgtttgcttcgcctttatcatagctgagactgacgccgccgccgttggcccgcacgccgccccatttggtgccggtattgctgctggcatccttttgcccgccaaacgccagcagcgagctggagatcgggcgacgatgcgcgttcagggtataacccaacggcccgatatcgtcgctatagctgacgccgccaaccacatcaacgacattaaagcccatcggcgtcgtgccgatatcccagcgccaggtctcattctgccagccgaccgccacgctcgcgcccgtatcggcctggctacgatgtccgctgcatttctccagcgtacaggtaccccagttattatcgtattttccatccgcatccgtagagaagcggccaacatccatattcaccatatcagtacgaaagaacgcccgtccgtccgaccagggcgcatccacctgaagcatcgtggtatgcgccttcagatcggagtaaccgccagtcccgctcgacccccaataatcgtgcgccaacgtgacattgagatcctgctgacggtacaactccgccgcatcgctacgcacgccgcgttttagccagtcgtctttttcatcattgcgcgtcaggcgggtaaaggtatcgttatcctggggacgaaccggcgtaatcgccgcggcgaccattgcgtctttgtaggtctccagcgcccgctgcggctcgcccgtttgcgcctgaaaagcggcggcgtcacgcaataccatcgcgctttccattgatggcggctgtgcttttgcctgcggcgtaatgcggttgaaggtccgcgccgccgccgtgatatcgccaagctggagctgcgccagcgcgacgcggcgctgcatgttaatagaggtgatttgcgacgcaggcagcgccgccagctgagcgcgcgccgcagcgttatcgccctgtgcgatgtcgatttccacccgccccagcatggcatcgacattacccggttcccgcgccagaacggcgtcataagcggcgcgggccgccgcattatcgccacgctgctgcgcccagtccgccaacgttaacgcaatgcgcgtagagggcggctgctgacgtaacaacgcttccgcttcgcgttctttgccgctatcgcgcaagcggttagcgctttccagcacctggttactttgcaatcggcccgccagttcctgaatattgctgttccactggctggtcggcagggtattgagatgcgccagcgccgcccggtcccgatcgctgccggaaagataaagcccataagcatagacctgttccggatcgtttggcttctgctgcgccagagagcgcatttgcgcatcggcctgagcgtgctgcccggcctgccacagatcgcgtgacagtcggtacgtcacccacacgctccccggatctaatgccagccgacgacggtgcagttctgcggcctgcgcccatttgccctcgctttccagcgtttccgcctgctgcgccagacggtcattttccagactgcgttcgatatcgtcgatactgcgccgctggctggcggaaagagaagcgataaacgcggcggctttttgcggcgactgctggcgataaagattcgccagcccgcgtacagcattggtattaccgctatccatacgcagcgtctgctgataataacgttcggcggcggcattatctttgcgcgccatcgccacatcccccagccccagtaccgcgtagctgtcggtgttatccactgctcgcgcctgctgatagaaacgctccgcctgggccagattattcgcttttaaggccgcgtcgccctgctgaattaacagccagtagcgattgaccttcagcagactctcccacttatcgcggctgctgctgtgcggcgccatcgccagcgccttttcaaactgcgcgacggcgcgggcgcgatcgccacgctgtgagtatgcctgccccagcgcgccgaccgcctcgctgtcgtcctgccgggcgctcaccgcctgctgcaattgcgcaatggccttaccgccttctccggcattaaccgccgcgatgccctgcgagcgcgcacggaacgccggatcggctaactgtttttgctgctcgctaagctgggcgcgggcggcagacacgctatcgccttcgctaaactgcgtcagatagtcttgcaacgcttttacgctggcgtcgctaaccgggagatcttttatctgctggtaccagatggcggaggccgcgctgcgtcccgtactggatttcgccatctgtttaagcaccgcgaatccctcatcgcgccgcccgctggcgaacaacagttgcgccagcgcattttgcagagcgttattacccggactgacggcattgattttctgtagctggttaatcgcttcgtgacggcgggcgggcaatttcgccacggtcgtccagtattcgaccgccagttcgccctccggcggataacctttaaacagcttgtcgtagctggcgatcgcttgttcagtatggccggtcgtcgccagtaaacgcgcctcctgcaaagactggcgtccttgcggcgtggagagcagcatcgcggtgcgggaagattgatacgccgtcgactccggcgccagttgcgccagccggtcaagtagcttctgtgccccgtcgctatccccctggcgcaacagatagcggaaacgggcggcgataacctgtggatcattggggtcgatcagctccaggcgatagagcgactgacggactaagtcctcacggtgcgtggcctcgcccagccgaacctgctccagcaactgttgctgcgcggaggtcgctgcgccggcaagcggtgttagcgccataccaagcgataaacccaacaatgcccgagaaacgccccttttgccaggtaaggcgtttcgaccgccagccggcaaaaaagcgtgcatgagacttaacgtgaacttacgcattcctggccccagtcaggtaataattcacctttgacggtgaagcgaaaacggtgctgatcccagccttgtccaaagagagtcagcacatagttgtaataggcatcgctgccaggaaaatggtctgcgacccgctgtcgctgcacggcctgggcgtcgcgattttgcaggaaaggcagtaaggcggcggaaaacccgaccggccccgtcccttgcgcattcccgctgacgacatccactttctccggtggaacgccgtttttcatcgttaacgtcgccatcggtttaaatcgcgccagtaaacgcgctttttgcggatcgccatcatgcatcattcccgcccataaatagacgcgaatcgcatcgtagctactgatcagcgtcttttccgctttcaactgccagccttgcttgctttcataacgcacccagtccggcgagaaacctttcggcgcggtttccagcaaaagccgcaaattggtttcccgtaacgtcgaccacggcgcgccaaaacggctaaagtattgcgccaactgcggcggcagatagcttgggttaaaacgccagctattcgcctcggcaaagccgattttgccaggtagcagcattgagcccagccccggcacattcaggacctcttcgcgggcgatgcgttttagcaacgccgtgcccacctcggtataacgcgtctctttccacagacgaccggcctccagcagcgaccatgccatccagatatcgccgtcggacgcggagttgctgtccagcaccgaccaggtgtcgggatctttttgcccccacagccaggcgggcagatattcacgcaacgatccctgcgccagattgttttgcgtccagttaaacagttgcgcgaacgccggtcgatcgttcgctgccagggcaaagaacatggcgtagctttgcccttcggaggtggtaatttttcgcgcatcgcccggatcgataacgcgtccctgctggctaatgtaatctttcttgaactgttcccacgcaggccagctacaggctgcctgcgcatttattgccgtcagcatgacgagcatcgttatccatccgcgcagcatagtcatcatgcgttactcatggtcagggtcgagacgacggcgactgagaatacgtagcagacgccacaatacccacgccagtaataccacactgagggccgccagtaccgccagcagcaccgggtgattcgccagcgcataccacagccgctcaaaccacggcagatgtccgacgtaatagatatcgccaacgcgcagactgtgaacgccggactcgcggatcaccgccacggaaccaaacatcgcggcgcgtttaccgctgtcgttcacggcgtcgttcagtagctggtaaccgcgcgggctgtcagccagcagagcaatcacgctgcgctgatcgttaaacggcgactggaagcccaccaccgccgccatcgggccgctggcggtgacggtggactgcgcatccgccgcgcgatcggcctcatccggcataatcgacgggaaagcggtctgccgcatcggggtttttacccagctttgtgtcgcctgcaccaacagatcgatacgcttatcgtcttttagcttgcccggaatagcgctaataatcagcagatcggcgtctttgtcggctatctgagcgctatcatcggtgattgtcagattaattgccgggaaaccggtctgtccgccaatggcgccgaccgtattcagcagcgtttccatttgcgcttcggttggggtcttcggcatcaccgccagcgtgtcagacaggtcggccatccggctgaacgggaaacccgcattggcgaacgcgcgtaaatccggcatcgcgataaagtggtaatatttcgaaaaatcgatagtggagtcatcccctatcaccacatgattcggtaccggctggaaggtaatacagttgtccaccgacccgcccggcatcggattcatatagcggaagtcaaaacgtagttggttcatcgcccccagtttgagcgccggaatagacacatccgttttaccatccagcagtccctgaagtaccggcaggcgcaacaggagtcgattagtttcctgcgtgctgttaaggctaaaggcttgcaggaactggttattcagactgatatccagccgtgaactgtctttggtcggcggcgaggtataacggtagttgagatccatatcaataccgttgctacgcagcaaatagaggtccggcggcagattcaaagaaacgttgatgggcgccggctccagcccactcgactggagctgctcttcataggttttcagctcgccaaaagtgaccgggcgatcggtacgcacccagttcggcgcatcatacggtttgcgcgccagcagcggttttacatcgttgaccaccacgctggaaccacggaagagaatattcccttgtgcgataccttttgccgcctgcaacaggtctttatcatctcgaccaaacacaaccagcaacttcacatacggattatccggatggctcatcatctcgataaccggcgcgttaaccgcaggatgatcgcgcaggaaatcggggcgtcgatcgttggtggcgaacacgatcgcattgcgatccggcaggtgattatacaacaccgggaagcgctgaccgcgccagcccgcccgcgatccaaaccaggacgcgacaatagaagccgcctgctgctgcgccagatccggcatatcagcaaacactatcggcaacgtcactggacggttatcccgcggatcgaaaaacggcaccgggaagtgggacagatcgttattcaccgccagcatgttataggtcagatccagggcgctatttcgcccgatgtctaaccacagagtactgctggccgggttttcacacacgtcgcgatagtggccgacaaactccagccgcacccggttaaagtcggtgataaatagcggattgataggtacctgcgccagcgtctttttccccaactgctcttttgtcaccggcagtacgcccatcagttcatcattgagataaaccttgagctgcgactgaaccggcaggagcgacggcgagggcgtatattccagattcagcaccgctttcgacgccacttcatcgctgcgcataccaaattcaatgccgccgttagggttaacgccacgcagcgccatactacccggcggcggcgcgatttgcgcaaaggtcagcttgacctcgcgcgaaggcgcggtctgcgccacgacgggcgcctcagttgcgggcgacggcgcaggctcggtgggttcagcatttatcaatggcggcgtagcaggcgccgccgccgtcatgaaagcaggaaacgcgcttaatcctattaccgccgcacacatccaggacaattttcttttcatcgcattatcatcattgttgagcctgagccataacccgatccgacggctgtatcgccgcttgccgctccgggcgacgcggaataaacgatacaatccaggcaattaacgccgtcaacgatcggaaaattacttttactgaaggcggcgcgaattccgcgaggtggcgatatccgcggaagcccagcttcagaatatccagcaagctttccagcggtttatcttccgggaagctatcttgccaaagcgcccacgtatcggcgcgcgcgaaggtacactgcacaaaatcaatatgttgtttggtggtgagcggcatcagttgtagcccgacctcattgcccgttacgcgcaccacctgcgttggaaagacatattcctgctgcccgcgtttaagcaacagattcactttctgcccttccagcacctgcgcctgaccgttgatcttgatgcctaacccgccgtcggagaagtcatgtacggtacaggagaacaaatgtccatcttcgcgggcgatggcccccggcatggcaatctcgacccgatgcgcgcgcctgacctgtttactctctaccgaaaccgcaaccgcgccgccgagaatgaccaggttatagaagacccacaccaggctaacgatgacggtcagcgtttcattttccggcccgtaatagtatcgccatacgcccgccgccacgccgagcaggttaagcaagacaaggaagatatacggacgcgagattacccagtcgacgtacttctcttccaccagcccgcctttcgccgtgacgttaaatttccctttgtgcggattgatcaacgcgaccagagtcggcggtgcgatataccatgccagtaccgtttcatagatttcactccagaaagagtgacgatacttgccctgaatcttcgagttagtcaggctggcgtggaccatgtgcggtatcacaaatagcgcaatcatcaacgcaggcgcataaatgatataggcgtgcagcagcagaaaagccagcggcgcggtcagaaagatcaggcgcggaatgccggacaagaaatggaacatcgcgttgaggtagcacagccgctgcgccagttttaagcctttaccaaacagagggttatcgaggcggaaaatttgcaccataccccgcgcccaacgaatacgctgcccgatatgcgccgacaggctttccgtcgccagccccgccgcctgcggaatgcgcatatacgctgaggtataacctcgccggtgcagccggagcgaagtatgcgcatcttccgtcaccgtctcaacggcgataccgccaatctcatccagcggcttacggcgaatcaccgcgcacgatccgcaaaagaaagtggcgtcccacatatcgttaccgtcctgcaccagtccgtaaaacagcgtgccttcgttaggcgttttacgaaaacgtcccaggttgcgctcaaacgggtccggggagaagaaatgatgcggcgtctgcatcatcgccagctgtttttctttcaggaaccagcccattgtcatttgcagaaacgagcgtgtcggcacatggtcgcaatcgaagatcgccacaaactcgcctttcgcgtgttttagcgcattgttgatgttgccggctttggcgtgttcatgcgtggtgcgggcaatgtaatgcacgccaacatgtcgggcaaaatgacgaaatgattcacgcccgccgtcatcaaggatccagatattcagcttgtccttcggccagtcaatgccaagcgaagcgtaaatggtatttttgaccacattaaggtcttcgttataggtcggtacaaaaatatccaccgtcggccactgcgacatttctttcggcaacggcaccggttgacgatttaacggccacaccacctggaagtaccccagcaccagcacaatccaggcgtaggtttccgcaaacagcagaatcagcccgcacaccagactgaccgggtcgtcccaatttagcgtcgaggtatagcgccaccagatataacgacaggagaccgttaacgacagcacgatgagcatcagcgcggaaaagcgtcccggcatacgtcgtaccaacagcgcaacgccccacagcaacagcagaaagataaattgcgatagcgggttaaatggctgcgtaatacagatcagcgccagtatcagtgaaaaggtcacgataacgcccagaataaaacgccgggcgccgttgctaagatgtcccagctctttttccttttccaggtgcgttgtcttttggcgcacccgttccggtaaggtatccatccattgatggtaacgtccacgaacgtccttcaggcgcgcaaatgaccgccagcgcggttcatgacgttctttagtcgacgagatcatcaccagccagagggtctgaatgaggtaacgggccgggtccagcgggcgcgggcgtgcggcgttaatatgcggataaagcgctttatgcccgtcgcgaatacgctgccagcgcggatgctcaagcggaaacactatccacgccagaatcgtccacaggcagccgagcgctgcgctaaacggcgacgcgccgtggcggcggtaaccctgatagcgctcgctcaaacgcgcgctaaccggcgggataagcagccaccgggaaagggcgctcatcgcaggctcccggcggacgttttgtcgcccgcatcatgcagcaggcaccagttcgccagcgttaacacctcttcggcggctaacgaatcgctgcgatattcgcctaacggctgtttcgacgccatgcactccgccatcgcctcatcgcgatggatcacaatgggcagcaaccggcgctggctttgcagccagacctggtacagatcgtcctgtaactgactgccaatgcgtaagtcattgatcagaatatgcgctccggcaggcaacgcctgctgatgaaggcgaatatggcagttagcgtcaacccgggctatcgccagcgtatggtcgcagaggctcaccagttgccgtgtcagcggtgacgcgccgtagggcaagtccagtaaaatccagctataacgcccgctcgctttcagcgcctggatagccgatccgatctctcccagcgtctcctgccaggactgcggattttcccgctcttgcgcggtgagctgtccaaacggcagtagatcaagctgtgaggtataacgtaatccggcatcgcgccagtcctggccgtccagcaacgatcgcgcccaaccgccctgatggacgaagtcgacgttaaacgacatgcgcagcaggttatcggggctggcgtcaatcaccaggacattttcccctaagatttgtaacgcccaggcgagtgctgcggtgagagatgtggttcccaccccgccgcgcacgccctgcagtcccagaatcgccattcatggcttccttaatgaatgtggttgcgcaaattcagccaggagcggccatcttttaatcgccgccgccaactgttcgcgttgggaaatatcggtataatctatttcgggtagtgaaaacgcctggcttaatgccagaaaatcattttgaaaagtgtagcccaacgttggatcggactgagcgccaggttcattgttatacattctggttgctcctttttaaatatttctcactggcagcattacgccccgtcgtcaatacgggagaacgcgcatttttcatctttccgtgacatcatttataatgtgtaaaaatgcaaagcgcagagttacagggcatcctgccgggcaaattgattcacatgctaaatctgatgcgttttaatttcaatgttaggtttatttctgtgctttcgctagtaaactgataaacagttaaaatagtgacatgagggacactgtggaccccgtattttctctcggcatctcatcattatgggatgaactgcgccatatgccaaccggcggcgtctggtgggttaacgccgatcgccagcaagatgccatcagtctggtgaatcaaacgattgcgtcacaaacggagaatgcaaatgtcgccgtcatcggcatggaaggcgatcctggcaaagtaatcaaattagatgaatctcacggtccggagaaaatccgcttatttaccatgccggcttcagaaaaagggctatactctttgccccacgatttgctttgttctgttaacccgacgcattactttttcattcttatttgtgcaaataacacgtggcggaatataacgtcagaaagcctgcataaatggctggaaaaaatgaataaatggactcgttttcatcactgttcattgttggttattaacccttgtaataatagcgataaacagtcctcgttgttgatgggcgagtatcgctcactttttggcctcgccagtttacgttttcagggcgaccaacatttgttcgatattgccttctggtgtaacgaaaaaggcgtcagcgcccgacagcagttattgctgtgtcagcaggacgaacgctggacgctatcccatcaggaggagacggcaattcagccgcgtagcgacgaaaaacgcattcttagccacgtcgccgtccttgaaggcgcgccgccgctctcggaacactggacgcttttcgacaataacgaagcgctattcaacgacgcgcgcacggcgcaggccgcgacaattattttttcgcttacacagaacaaccaaatcgagccgcttgctcgtcgcattcatactttgcggcgccagcggggaagcgcgctgaaaattgtcgtgcgcgaaaatatcgccagtttgcgcgccaccgatgagcgcctgctgctgggctgcggcgcgaatatgatcattccctggaacgccccgctttcacgctgcctgacgcttattgaaagcgtgcaggggcagcagttcagccgttacgtaccggaagacatcaccacgctactgtcgatgacgcagccgttgaaactgcgcggttttcagccgtgggataccttctgcgatgccatccatacgatgatgagcaacaccctgctccccgccgacgggaaaggcgttctggtcgcgctgcgcccggtgccgggcattcgggttgagcaggcgttaacattatgtcggccaaaccgaaccggcgatattatgaccatcggcggcaaccgtctggtgctgtttttatcattctgccgggtcaacgatctggataccgcgttaaaccatattttccctttgccgacgggcgatattttctctaatcgtatggtctggttcgaagataaacaaatcagcgccgagctggtgcagatgcgcttattgtcgccggaactgtggggaacgccgctaccgctggcaaaacgcgccgacccggtaataaatgccgaacacgatggccgcatctggcgtcgtattcctgaacccctgcgattgctcgacgacaccgcggagcgtgcatcatgatgaccatcagcgatatcgtgcaaattattcttttttgcgcgctgattttctttccgctggggtatctggcgcgccattcgctacgccgtatcagtgatacgacccggctgctatttgccaaacctcgttatgtaaaaccagccggaactctgcgccgcgctacgaaagtcaaggcagacaaaaaatgactcagcatactcaaactccttcaatgccttctccgctctggcaatactggcgcggtctttccggctggaacttctattttctggtcaagtttggcctgctgtgggcaggctatctgaattttcatcctttactgaatttggtattcatggcgtttctgctcatgccaataccaaagtatcgccttcaccggttgcgccactggattgccattcccgtcggcttcgcgctgttctggcatgatacctggctgcccggcccgcaaagcattatgagccaggggacgcaggtggcggaattcagctccggttatctgctcgatctgatcgcccgttttattaactggcaaatgatcggcgccatcttcgtactgctggttgcctggctatttttatcacagtggattcgggtcacggtgtttgtggtcgccatcatggtatggctgaatgtactgacattaaccggcccggtttttacgctgtggccggcaggccagccaaccgatacggtgacgacaactggcggtaacgcggccgctaccgtcgcgacagcgggcgataagccggtcatcggcgatatgcctgcgcaaaccgcgccgccgacgaccgcgaatctgaacgcctggttgaacaccttctatgccgcggaagaaaagcggaaaacgacgttcccggcgcaacttccgcctgatgcgcagccgttcgacctattggtcatcaatatctgttcgctctcctggtcggatgtcgaagcggcaggcctgatgtcacatccgctatggtcgcactttgacattttgtttaaacactttaattccggtacgtcttacagcggcccggcggccattcgtctgctgcgcgccagctgtggtcaaccttcgcatacccgactttatcaaccagccaataacgaatgttatctgtttgataatctggcgaaactgggctttactcagcatctgatgatggatcataacggtgaatttggcggcttcctgaaagaagttcgcgaaaacggcggtatgcagagcgaactgatgaaccagtccggcctgccaaccgccctgctgtcattcgacggctcgccggtatatgacgatctggcggtcctgaaccgctggttgacaggggaagaacgtgaagccaattcccgctccgcgactttctttaacctgctgccgctgcacgatggcaaccacttccccggcgtcagcaaaacggcggattataaaatccgcgcgcagaaactgttcgatgaactggacgccttctttaccgaactggagaaatccgggcgtaaggtgatggtagtcgtcgtaccggagcacggcggcgcgctgaagggcgacagaatgcagatctcaggcctgcgcgatattcccagcccctccatcaccaacgtcccggcgggcgtgaaattttttggcatgaaagccccgcatgagggcgcgccgattgatattaatcagccgagcagctacctggcgatttccgaactggtcgtacgcgccgtggacggtaagctctttaccgaagacagtgtgaactggaacaagctgaccagcaatctgccgcaaaccgcgccggtttcagaaaacgctaatgcggtggtgattcagtaccagggtaagccctacgttcgtctgaatggcggcgactgggtgccttacccgcagtaaaccgaaaaaggccgcaaggtttcccctgcggcctggttcgggcgcatgttgccattacggcggacagacgctcaaaacgcgttacttcctgtcacgtagccagttgacgatcacactggcgataatgccagcaatgatcggcgctgccagatcgtgccagaagaccacgcccaactgcgtaagcgtcatatagccgccttgttgcaatggcaaccgttcgcggctatccttaaagtgtttgggttcaagttagcccccgtcaggttgccaggtttataccagtcaacgtgcgggggttttctctatccagcaacctatgccgccggggatcaaacccccgcaacattgcgcctcaccgggtaaacccggcttgctgctgatattacggcaaaatccccgtcccggcacggcgctaacgtgcaatctgcgtgacgcttcgcagacgattacttttatttgccagaatacattcagcatttctgaggctggcagtcagccgctcaattctgtaaattatgcctcctcgcggccagtcccggtgataccgaaaccctcgttcagcatcctgcgtctatgacatattcgcctgttgcgccagaggaatggctaaaagcaggtattaccgacgaacttatccgtctttcagcgggacctgaagatcccgacgatattattcatgaccttgaacgcgccagcagaaaagcagcattctgacgattgctcggcgaaccgctgtcaccggtttgccgcatcgggtatcaaggcactatagcctggttataggcagcattctttatgagagagctgcgtatattttgggcagggggctctatgcaggacgacacattaccattaaataacagtaacgctacgaccacaccgctttcaacgagattaccgtttacaaaatatgattttggctgggtgctcttgtgtatcggaatggcgatcggcgccggtaccgtcttaatgccagtgcaaatcggtctcaaggggatctgggtatttattaccgcttttatcatcgcctatcccgctacctatattgtgcaggatatttatctaaaaacgttatctgaaagcgaaacctgtgacgattatacggatattatcagtcactatcttggcaaaaactggggcatttttctcggtgtaatctattttcttatgattatccacggggtgtttatttattccctgtcggtggtgtttgatagcgcctcctatatcaaaaccttcggccttactgaggccgatctttcgcagtctattatctataaagtcgcgattttcgccgtgctggtggcgattgcctccggcggggaaaagttattatttaaaatttccggcccgatggtggtggtaaaagtcgggatcattctgatattcggtttcgcgatgatcccacactggaatcttgataatatttccgcctttcccgccgcatcggttttctttcgcgacgtactgctcactatcccattttgcttcttttctgcggtcttcattcaggtgctaaacccaatgaacatcgcctatcgtaagcgcgaacctgaccgtgtgctggccacccggatggcgattcgcacgcatcgcattagctatattacgctgattgccattattctctttttctcgttctcgtttaccttttcgattagtcatgaagaggcggtatcagcattcgagcagaatatttccgcccttgcgctggcagctcaggtaatccctggccatatcatccacattacctctaccatcctcaatatttttgccgtacttaccgcgttctttggtatttatttaggttttcacgaagcgcttaaaggtattgtactgaatgtattgagtcgtattatggatgtcaaaaacgtcaacccactgttactgacatctggaatctgtgtctttatcgtggttactctggttatttgggtttcgtttcgcgtctcagtattggtctttttccagttaggcagtccgctttatggcattgtcgcgtgtattattccctttttcctgatttataaagtagcgcaactggaaaaattacgcggcctgaaaacctggcttattctgttatatggaatattgttgtgcctgtcgccgttattaaaattgattgaataagtcgtaccggagagccatgcccggtggcgctacgcttaccaggcctacaggtacggtgtaggcttgataaggcgcagccgccatccggcataaaacgcaattaactcagcggtttctgcggattttcatcctgatcgacggcaaagcaggccaccaactggccgtcgtactctttaagctgcggctgtaactgcgtacagggtccgaagcgacggctgcagcgggcgttgaaggcgcagcccggcggcgggttcagcgggctcggcaactcgccggtcagcttaatccgctcacggcgatcgtccggattcagccgtggcgtggcggagagcaacgcctgggtatagggatgacgtggattgttaaaaatctgctctttggtccctttctccacgcagcggcctaagtacatgaccatcacttcatcggcgatgtgttccaccaccgacaggtcgtgcgagataaagacataagacagccccatatcctgttgcaaatccatcatcaggttcagcacctgggcgcgcaccgacacgtcgagcgcggagaccggttcgtcggcaatcactacgtccggatcaagcatcagaccgcgggcgatagcgatacgctgacgctggccgccggagaacatatgcggatagcggtcgtagtgctcggttttcagccccaccttcgccatcatcgccagcgctttttcacgacgctgcgctttactcaggctggtattgatcagcaacggctcttccagaatttgccccactttcttgcgtggattcagggaaccgtaggggttctgaaacacaatctgaattttctgccgccgcagtttctgcgcgtgcggatcgtgtttaagcagatcctgcccctggtaataaagctcgccgccggttggcgtttcaatcatcgtcagcaggcgacccagtgtggattttccacaaccggactcccccactacggccagcgttttaccgcgttcgagattaaacgacacgccgtccagcgcttttaccagccgttccggagaaaagatccccttcttcaccggatagtgttttttcaggtcgatagcccgcaacagcggctgttgcaaggtggcctcatgcgtactcatagtgtgggcctcccggcatcatcgagtgggtaatgacattttgactgacgtccatcgtccagttggttgagagcaggttcttccgcacgacatctgtccgtggcgtaggggcagcgcgggttaagcagacagcccgtcggtcggtcatatttccccggcaccacgcccggcagcgacgccaggcgcgctttgtcctgagcaaactctggtaacgcgcgtagcagtgcctgggtgtagggatgacgcggcgcgcggaaaatatcctgcgcagcgccggtttcgacgacctgcccggcgtacatgacgataattttgtgcgccgcttccgccaccagcgccaggtcatgggtaatcagcaccagcgccatgttctctttttgctgcaactccagcagcagctcaatgatttgcgcctgaatggtcacatccagcgccgtggtcggttcatcggcaattaacagctttggtcgacaggctatggccatcgcaatcatcacacgctgactcatgccgccagaaagctggtgcggatagacatccagacgagaagccggatcgggaatacccacctggttcaacaggtcaatcgctcgctgacgacgggttttcttgttcccgccctgatgtaccttgatggcttccataatctgaaagccaacggtatagcaaggattgaggctggtcatcgggtcctggaaaatcatcgccacttcagcgcccaccaggttgcgacgttccttctcggaaatgcgcttcagatcctgtccgttaaagagcaggttttccgccatcacgcggcctgggtaatcgataagccccataattgccagcgagctgacggatttgccggaaccagactcgccgacaatcccgaccacctcaccctgcttcacgctgtagctaatgcggtcgacggctttgaacggtgtcccttcgtcgccgaagtgcaccgataattgatctacatttaataacgccatctcgaacctcttactgcttcagtttgggatcgagcgcgtcacgcagaccgtcacccatcaggttaaatgccagtaccgtcagcagaatcgccagccccgggaaggtcacgacccaccaggcgctttgcgcgaactgcagaacgtcagagagcatggtgccccattccggcgtaggcggctgtgcgcccatgccaagaaagccgagggcagccatatcgagaatggcgttagagaagcccagtgacgcctgaacgatcagcggcgcaaggcagttcgggaaaatattgacgaacatctgacgcatcgcgcctgcgcccgccacgcgggaggcagtcacataatcgcggttcacctctaccagaaccgccgcgcgggttaagcggacatagtgcggcagcgccacaaacgtcaacgccagcgcagcgttgccgatggaggggccgaagatcgccaccagcaccagcgccagcagcaggctcggcagggccagcataatatcgaccacgcgcatgatgatgttatcgaccagaccgccgaagtagcccgcgaccaggccgagaataatccccattaccagcgacaggacgaccaccagacagccgaccagcagtgacaaacgcgcgccatacatcaggcgcgagaggacatcgcgaccaacatcatccgttcccagaatatgcgcccaactgccgccttcctgccagaccggcggcgccagcagcgcatcgcggaactgctctgccgggttgtacggcgcaataaagttggcaaacaccgcaatcaggatcacgatgagaacatacgccagcccgacgaccgcgcctttattgcgtttgaaatagtgccagaactcccgcaatggcgtcatgggcgccggtgcggcattaacattattttcagtaacctgtgacatgatggccccttacttcttatgccgaatacgcgggttcaccacgccgtacagcaggtctaccagcaggttgacgagaataatcatcgtcgctaccagtaacacgccgccctgcactaccggataatcgcggcgttgcagcgcatcgatcagccagcgccccagaccgggccacgagaagatagtttctgtcagaatcgcgcctgccagcagcgtcccgacctgcaggccgatcacggtgacgactggcagcatggcgttacgcagagcatggacgataatgacgcgcatcctggtcaaccctttggcgcgtgcggtacggatgtaatcctcccccagcacttccagcatcgacgaacgggtcatacgcacaatgacggccagcgggattgtgccgagcaccatcgcaggcaggatcatatgcgccagcgcatcaataaagttaccctcttcgccccagatagcggtgtcgatcagcataaagcccgtcaacggattggtatcatcaaggaacaccatatcgctcacgcgcccggaaaccggcgtcaggttccagtggacggagaccagcatgatcagcatcatgccccaccagaagataggcatagagtaaccggtcagcgccaggccaacggcagtgtgatcgaagatagaaccgcgcttcactgcggccagcacgcccaccggaatccccacggcgacggcaaaaatcatggcgcagacgccaagttccagcgtcgctttaaagcgaggcacaaactcgtcccatacagggattcggcttttcagcgagatgcctaaatcgccatgcatcaccccccagatataatggaggtactgctgccacatcggtttatcaagaccgagttcagccagcagttgagcatgacgctcaggggaaatacctcgctcacccgccatgatcatcaccggatcgccggggatcatgtggacaaaggcaaaggtgagaagggtaataccgataaacgtcgggataacgagtcccaaacgtcggagaatgaactgcaacataacccgaattctctctcatgacccacggcctggaaccgtgagtctgtattgctcacaaatcttatcccacgcaaactgcatcgcggataaagcattacgccggatggcgctgcgcttatccggcctacacaacaccggggcgcagcgctcttttaattattcgacagagacgttttcgaagtgatgtttgcctaatggatcaaccacatagcctttaacttctttacgcactggctcataaaccgtggagtgagcgatgatcagcgctggcgcctggtcatgcatcacaacctgggcctgtttatagagctcaatacgcttgttgtggtcatcggtcgcacgcgcaggctgaatcaggtcttcaaacggcttataacaccattttgaatagttggagccttgctgggcggcatcgcagctgaacagcgtggcgaagaagttatccggatcgccattatcgccggtccagcccatcatcaccgtctggtgctcgccatctttagcgcgcttgaggtattcgccccattcataggtgacaattttggcctgaacgccaatcttcgcccaatccgcctggatcatttccgccatacgacgcgcattcgggttatagggacgctgtaccggcatcgcccacagatcgatggtgaagcctttttccagaccggcttctttcagcagcgccttcgctttttccggatcgtagccatagtctttaatatcgtcgttgtagccccacattgtcggcgggatcaggtttttcgccgcaacgcccgcgccctgataaacggctttgatgatggcctctttattcacggcataggtcaacgcctggcgaactttgacatcatccagcggttttttctgcacgttataggagagataacccacgttcagaccggcctgctccatcaggttgatgtttttatcttctttcatgcgcgcaatatccgccgggttcggatacggcatcacctgacattcgttcttctgcagtttggcgtaacgcacagaggcgtcaggcgtgatggagaagaccagacggtcaatctgcggcttcgtgccccagtagccgtcaaaggctttgtagagaatgcgggagtctttctgatattgcaccagttggaacgggccagtgccgaccgggttcagatccactttttccggcgtaccggctttcagcatgttgtcagcatattctttggaaagaatagaggcaaagtccatggctaaatcggcaaggaacggcgcttccggacgcgtcagcacaaactgcaccgtgtgatcgtcgaccttcttcacttcgctaatcagatccggcagccccatgccttcaaagtattcatagctgccgccagacactttatggtacgggttctgctcgtttttctgccggtcaaaagagaacacgacatcatcggcgttcagctcgcgcgtgggtttgaaatccttgctggattgccatttcacccctttacgtaggtggaacgtataggttttaccgtcttcgctgatatcccacttctcagcaagacccgggatcacttccgtggtgccggttttgaattcaaccagacggttatagataggtacggagctggcatcataggtggtgccagacgtaaagagctgtgggttaaagccttccggcgagccttctgaacaataaaccagggttttggcctgcacgcttgctgcaacggtcatggccaccaggctcaaaccaagcttcagcatccctgacttcttcaaggaaatactcattcttctgctccaattgtgatgtatgttgttttgccctttgcaaaggcttttaccgcccggccttttttgttttttacctggtcaggtcagtagtgagaggtggggattccgttcgcataatcgactgagttgcagtgcggattctccataaaatgcccctcattccctacaatctgtcaatagaatgtcaaaacgtcaatacaggtaaccagcttttacaacaacggtgagaattaacaaacaaagattaaaaaaagttcagaagggtattttcagcagggaaatttgtgctatggccagaaaggcagagttattcacttaatattttgcaacagttagtgattaacaattagacattaattgaaaaatttctttcgatatgttgattatctgagcgattaataccactaacgctaaaacgcacaggcgaaaatgctgaggttatccataagccgtgtgcaaaaaagagttatacggacgttgaaaaacaccatcgaatatgtcacaaaattgtaaataagtaggccgtcgtgcggcctaccgcgatcacaaaaactaacttttgaccctggcctgcgtgcgcttttcgctccagttaaacaacgagttcaccagaatcgccgtcaacgtccccgctgccatgccgttgccaaagaccatctgtacgcccgccgggaaattctgatacaggccgggtaccagtataggtagcattcccatggccagccccatcgccagcgcgtaggttttacccggcgtatgcagtggctcacgcgcaatcatatcaataccgataaccccgataatgctgaagacaatcaccgccgtaccgcacaccaccgaacctggcagacaggtcgccagacgtaccagcggcgcgaatatggcaatcaggattaacaatcctccggcagccgcagtcacgaaacgcgatttcacattagtggtgcgtaccaccccaatattttcgccggaggtgataattaaggaggtgccaaaaatcccccccagcagcgacattaccgcatcaccacgaatggtgcgtggaatcgcctgctgcacattttgcgtggaattgactatttccgcggtcgcaatcgtttgcccggttgcttcagccatagagatgaccgcgtaaatcagtaacggcagcgaggcggagagatcaaaaatcggccagccgaacggcaaaagctgtgggaaactaaacagcggcccgtgactcacaccgctaaaatcggtgctgcccagcgccattcccagcaacgttcccgctaaaaggccgaacatcaccgccagctggcgcaaaataccgctaaacgccagcgcgaaaatcagcgttatcaggatagtccccagcgataaaatgatactggttggatgagcgaagtcggcgctccctggctggccaatgatcaatccgccgtacaggcgaataaggttaatcgacaccattagcagcatgatgccaatgataaaagggggaaaatggtgcaggcagcggcggaaaatcggcaacgcgataaagtagaacagcgaggtcagaattacggcgccaatcgcggtctggatattggtctgtaaagcgatcgcaacgaaaatcgcaatcggcgcgccccccggtaccataataaacggcaaacgcgcgcccacccctttcacacccaggctttgcaaaatagcgcccagaccgcacatcagaaaggtcgcgctaagtaccgaggcggtcaccgtatcggtaaagtggagcgctttggcgatcagaaagacggaggtaatgggggtggcggcaacgaccagcacatgctgaagcgccaaaagtaaggtggtttgccagggtaatgcatcgttatccggcgtagtaaggccaggttgcggcatgattaactcccataaaacatcaaaaaaataaccgccagcgcgggctggcggtctgtattatttcaaccaactaatggcatcagcggcatagcgatgcgcacggaaggcgctgttctgttttccaggaataatgcctttactgaggtgctccggatattcattaaagaacggaatgatatattcccataccgtttcgccttccggggtgacttcaaacaggcggccaaacgccgattcacagataaaggtgttgccgttcgccagccgctgcgcgctccccatatacggcgagaaaaacgccggcgggaagatatcgcgatactgccaggtaatcgctttggtctgcggatcgaactccagcaccgtggaatgcggcgaggtgacgccgggacgcaggttgccgttatcgaaaaccagaatcgacccgttctccatctcaaccggcgtgtgctgctgcgctacgacttccggccctgcatgccagataaccttcccgctctctttatccacggcaatgacgccggaagtggtacgcaggctcatcagcaccaagccatcacgggtgacggacaggccgttaatcatcggccagtggcggcggtcgaaaatatcatgaatcgggaaatcttccggattcaaatgctcccaggcgcgccattcccagaccacttcaccgtcgcgattgacctctttgacgacgtcgctctgaatgatgccgtccggcgcatcgcggcgcgggtcgccgccggtaacacgggcggcgatatcggcaggcaacggcgacgcggcggtatacagcagattaccgttcgccaaccattgcgcatcatggtgatggtaaatatcttcgtaatgccagacgatttcgttatccggcgtcacttcgtagaagtcgccgccgtgccagagatcccacgccggatagaggttcgctgaagtgcggtggctgccgttataacccagattaccgttcggcagcagcaccgcatcacgcccggcgcgaaccggaagctgccactgatgcgcgacttcgccctgctcgtccaccaggtaaacccgcccttcggcggtttgcggcgcaaaaagcgtatagccgccaaagctcttcgccttatcagcgtagataaggcccgccagacggcgtccaagggtgaaagtcgaatcctgagttaagtgtgccacatcgcctcctgaggaataaatttgcgccaaaataccccattaaaacgttttaatgaagggttttttacgatcctcactgaaaaaaagcaaacgttaccgtctggtaaatatgctaccctgtgcgcaaattttcgcaggtcaggaagcagatggctgttcaaaataaaaaacgcgcaaagttgattgatgttgcccgccatgcaggcgtgtcgccagggacagtatccaatgcattgcacaacactcgctttgtcgagccgcagacgcgacggcgtattgaagaggccattgctgcgctcaactacacgccgaatattcgcgctcgccagttacgaaccggcaaaaccaataccattgctttgctctcttcggtgccgctggcgattgcctccggcgcatcacgactgggatttatgatggaggtggcgttaacgtccgcgatgatggcgctggaaaagcagcatgcgctgattctggtgccgccgggggcaaatccactggatgccgtcagctttgacgcggcgatcctgattgagccggcggagaacgacccgcagctccaggcgctggcgcaagcgggcattccctgcgtcaccattggccgcacgccggggaccgacacgcctgtgccgtgggttgagctgcactcggcggcaacagcacagcttctgctaacgcatctggagacctccggcgccagcaaatgtgcgttatttgtcggtaacactcggcgaacatcagttctggagagcgaagcggcttaccagcgctggtgcgcggggcgccaggcccccgtcgtctactctctcaatgaaagcgagggtgaaaatgccggctaccaggccgcgcagcagctattacaggcgcatcccgacgttgacggcgtgctggtgctgatcgatacctttgccagcggcgcggtacgcgctttccaggaacaggcagtcgctatcccggagcggatgcgcgtggtcacccgctatgatggtatccgcgcgcgcgaatcgctgccgccgctgacggctgtgaacatgcatcttgatgaggtggcgcgacaggcaatcacgctcctgtttgccgttttgtcgggtgagaagatcagctacagcgacgggatcatgcctgaactggtggtgagagcgtcaacctgccggtgatagaggatgactcgccactacgtggctcgccctgcgggccgttgctgacgcaacgttctctcgcttcgctcgagtcgaacctcttgcccccggaggttctcatcctcgtcagacttcagatacaaaaaaaccctgctcattgagcagggtttctgaatttggtcggtgatagaggattcgaacctccgaccccttcgtcccgaacgaagtgcgctaccaggctgcgccaatcaccgaatgcgggcgcatcttactgctcaggcgcacgcccgtcaatcccttagtcgcaaaatacaattcaatcggcgagaaagtcggcagacaacctacttcgcggcgactttctgcacatcgggaatatggcaccagttgttgttctggttaatgccgccattcggcgatgtataccccaggcagcccattatcgtatcgtatagctccacatgacgacgcggcactttgatctccgcctgctgtttcaggtgagcgaacatctgcgcatgttgcggactggcaagatatttatccgacatccataccagcatcggaacacggaattgctccggcggcgccatattgcgcggcgtaccgtgcaaatgttcgcgttcgttaatcgactcgccgtggtcagccgcgtagaacacaatcgcttttttatcacgtagctgatcgaacacactggtaataaagtgatccacataggtcacggagttatcgtaagagttgatcatctgcgctttcgtgcagccgctatcgaccccaatacattcgggcttccactgagcgtagctgcgcggataacgctgcgtatagttaaaatgcgatcccttggtatgcaggataatcagatgcttaccctccggattctgggcaagcgagttctgcatctcatcaatcaacagcatgtcatccaccgttttaccgcggttacgcggctcggcgccaatctgctcgcggtaagagatattatccgccatggtattgctatagaaccacatctcgctctgcatggcgtacagatcggaactgaatccgagctgtttgagtacggcaaaaacattctgctcttttaaggtacgctgcgggttattatccgccccgccttcccgtacaaacatacagcgtaaagaaagcttcgtcgcggtatcgcaggaatagccgcggaacgccgccagatttttttcctgcgccagcttcggcgtggtattacgctcgtagccgaaaatccccatgtgatcccaacgggtcgtctcaccgataatgaaaacgacgtaggtgtcatccccatctttcggcgcaacataggtaaatttcctggccgggtttattaacgaattattgtccgacgactcatctacctgcgcccaggcatacagccctaacgcagataaccagtttgagggcaggtaggagttcgccaccacgccgccatagctgggtaagtcgatgcctgtcgcccgttcaacctttttttgctgtatatccagcaggcgaataggcgcccacaccattacgcctgcgagtaccactacagcggcgctgcgaaaacgctgccccggcgtacgtagctggcgcaacaacgtgtagcgacagtggttactccagataaagatgagcggaagcacgctcacggcaatcagccacaatacaaagtgcagccccaccacctctttcgagagatcgatatcggtggtcataacagacgcaataatgccgtagccaatcaccacgttcaggaaggtcatgtaataactggcgccagcggaaaacagcaccaccagcgtggccagcacacgccagacgcgtcggccaaacagtgaaagaagacgaagtaagaagaaagtgaccagcaccgtggcgcccagttcgacaactgcggagaggcctttccaaatggtaaattcttgtgcataactgccgaaacggcggtaaaacacggcgcaattcataaacagaccgatatagagcgcaagcaagaaactaagtttctgttgcgtcatcgatttaatgtatctcatgcaaacaaaccctgggaatcgggataaaaacgacctgtacaacgattctttaatcaaacaggtaaatatgcggctaacgcagatgtaagaaagtctacaagcacggttaagtagaccacaagcagaggggaaagtggcaacggagagtgtgatcggagaagatttttacaaaaaatcactaaaaatggaaaagggccagcgaactggccctcagtgattattcgtatgtgacgctaaaattcaccgtcgcattcgctgtgccaacggtggcatccggcttaacaggcacatagctggcgatatagttcagcttgttcgtaccatcaaaccagacagtgtgttcgacaggcgtagagtcggtactggaggggtattgttgctccccaccagatgttttaatttttaacgccacgcccgtcgcgccgccgctatccagggcaaaaagcgaggggtcagtcgggtccggagaaccgtccatcgtaacgctggcctttgtggcatacgcgcaatcttttaagccgatgctaaagtttttctggttcagctctttacccacttttaccgggcgctgaagcaccacggtctccatattgacgtcgatactgtcgttttccagttcacaggtagccgccttaatagtaatggtaaagtggatatcaccagcagaaccgatattcgacggtgccgccatcgcggaagcggtaagcagtaaacacgctggcatcaaagcatgaaggtttttcatcctgcttactccacatcaatacgcatggtggcaattccctcgaaatccccggcggccggcaatttgccggtggtactgatagggtaagccgaaatggtcgttgaggcggtacggtgcgtgtcgtcaacaagacccgatacgctcagctcctgattaacactggcgtcatttggcaccaaaattttaccgttagcgccctcaatgacggcaccgatatccgggttgcccatgtcgatggcattcgaatcattagcgtttggcattccctcaatacgcaggaagatctttacgccatcggaaatattggtgcatttaaactgcagctctttggtgaatttcgtggcgttctttgcaacttgtcctttgcgatctttaaaatcagtggccttaaattccccaaacggaatttccagcgtgctgccgctggagagttcacagccctgaggtaccgtaattgaaccactgatatatacagacgacgcaggtatactgccatatacactgggtttctttgtcacaaaaaggtccattattttggtgctaggtataatactttcacccacaaacggatggagaatatagagcgataagtgacctttgccaccggatgtccatattgcatctttactacttgcattttgcgaacactgagagcggttgtttgtcaggttacctacattctcaaacggtgtgttaacgtattctcctcgtccccccgaaatcagtacatcgctcgcaatggcaatattattattgatctggtaataggagcgactctctatattcgtaacaaaggccagaggaaccacagccttaaataaggtgtcatttataagagaggtatcatcagggcattcacaggacatcgcataggttccacctaaattccagctatcgaaatctacgaaggtcgcacccgttgtgttctttgacgtatctgaaactgttttatttatggtggcactgaagatatgtgttccaccttcaggagtacatggtccaaaatctgccgctgccagcgcctgccccgaaaacagcaccgacccgcccaacaggcccgtaaacattatcaactttttcaacataatcgtttccttccctgttaccggcagacggcattcgccatcaccacgccggtattatcctgttgttccggcagcgtaaacgccacgcggcattgctgtgcctggtctttaccccagttcacctgaagggcacctttctccggcatcccgctgatataaagctgaccgtcttcacccacaatgctgctggactcttttgtggtatccagcagcgtggcggtagcaccaaacggcaccgctttgccattggcctgcgtcagattcatcagcacacgatagcccactcgggtatcgaagcgggcacgaacaatcgcgccgcgtgtcggcactacgttgacggaggcggtatccaggtcaacctggttgttcaggctgtcgcttcgcagtgagacttccgtttcacggtacggagtaaggtaaggtacgaccgcattacccatccagtccacttccacaccaccgttgttgatcacgtgcgcgccgcgcgcgcccggcgcggagataatggccatggattcacccagcggttgagaaagagtgataccttcgctatgggctatcacaccgccgcgcaaaccgtagttcacctgctggccgtcacggttgtagttgtaacccaggctggcgctacccacgccgccctggtaatccaggttcacgctgccgctgttacccacgccgttgctgccgtagccttcctgcacactatagttcaggttgtggtcttccagcgcggtgccgctcacccctaactgctggttggttcggccatgctgatcggtcgtgaggtggtagttactccacacgcgtcccagtggaatcgacatggagaatgacagtaaacgatcgctctcatcccactccgggcttttcgtccaggtgtaagcaacgctgtagttcacgcggccaatacggccgttataaccggcattcagcgaacgctgtttaccttcatcgttccagtagtcctgctgcgtgacgttaaaatagaccgagccccaggcgcccagttgctgcgtcacgttgccctgaatctgactacgtttgtggtactggctataagagctgtccgcatcgctgcgcacatccgtcgcttcctggaaggtgtaatagccgctggtcgaatacttgtaacccagcagacggaaatctgtaccgctgttaaagctcttggagtagaggaaacgataagactgaccttccgaattctcctcatttgccagcttgctttttgcctgggttacatcgatggagatcgcgccgatataaccgaagtttttacctaatcctcccgccagcgagtaatagtcgtcagagaagatcgcaccaccgtaaacggtaaagccatacggcaggccgtacatggcatcaagctgcccgaatttcggctcggcgctgttatagttcccggcacggtattccccggcggaaaggctgtatttgagatggccttcacgctggaggagcgccaccgaggagaacggctgaacgaacttctgctcactgccgtccgattctttaatggtgaccgtcaggtcgccgctgtttgaggttggatacaggtcgttaatttcaaacgcacccggctgaacaaacgtacggtaaataacgtagttgttctgctcaacggtaacttcggcgttacttttggcaataccccggatgacgggcgcaaacccgcgctggctgtcaggcagcatctcttcgtcggaagttaactgcacaccgcgcatctgaacgctgtcaaaaatatcaccggcagtggaggtatcccccaacgtcagctgtgatttcagcggtacaatggcacggcttaaggatgtgccaatgttatcccatgtgttgttaccgtcgtttcgcgtccaggtgctatagttacgtaaccgccatgcccccaggttcataccgctgcgcagattcagatagtagctgtcgctgttgtagctggtttcactgtcgtgtgcgtcatagctggcgttgctgccggaaaagttataatccaccagcagggcattcaccccttcgtcccactgcgattctggcaccgtaccgcgcgctgtctgcttcatcgcagcctgcgggaagctcatgatcagggtctggtctgcaaagtcgaaatggctggcggcctggggaataatgtcgtcaaaagcaacacaggcttcaggcggggccattttcagcgccgggaagctatcaatacgcacgcccatatcttcaagctgcacgcggcttaagcacggcaccagggattcacccatttttgcgcgctgcgcctctgtcgctgccttaaactccagggtgcgagactccatttttttttcgttgaccaccaccgagacgcggtatttacctggcaggtgttcagctttattggattcatacattgaaaggtcaacgtgctgatcaatacccggcacatcctccagaaagcgcgggttaaatgttcccgcatacgcggggagcgtacccgctatcatcagcgcaagcgcagactgcgtgaaacgcgaggtcttattgcccagaggaagatgcgtccatgtcatagtaataatcctttaaaacgtgttagttaacgcgctgtgtcaacatgtcgccagcagtgccaaagtcattaataatgttgtatttaacttcgcttaccttgccggtgccggctggcagttcaatattcaatgagccttttgccggaaccattcccgttttttcaatatcacggccgttggcataaaatttattaaacgtcaggttaaaggcagatgggttttccactttgatctggttagcccctgcgctggtgaactgcagtttgttccagccgtccatgctattgcctttcaggcccgccgggcgatagaacagttttaagcgggtacgtacggcgatctgcagtacgtttttagcttccgcgtcttcacttttggcaggaatagcttttacgttaatccaataaacggactcgcgatcctgcggtaacgtgttcgtcgtattaacaatacgtaaaacgttatttttagtcgggcttaatttaaataacggtggagtgatgataaagggcgtctttttattaccgttagcatcatcaatccatgactgaatgagaaattcatccgtggtgcttttattatttaccgtaagagaagcttcctttctactaccgtcataaataacacgcgtgctgcttaatgccacgcctccggcaaaactgttttgagcaatcaacgccagcaccagtgctgtgcaagatatcaaacgtgagcggttcatgattctcttcctgagcctccgctggaaaaaatggcaacgggatttccgttgccattatgattgtctgtattaacgaaaattcgattattcgtaggacaggttgaagtccacttctgcgttaccgtaaccagtggttacagtatcttttgttgcaacgtagttagcggtgtagtacagcacggtctgaccagcagccaacgtagtggtggatttaccggtgttcatttcaacaagcttgttagcgttgtcgtagataccgatgcccacgccagttgccgcacctgcttcagtgttaacagaaaccagtgtcgcatcgtctgtatcaccaacgccattgaagcttacgttaactttggtattagaggtgatgtcacagtcttccagtttgatctggaaaggcttagaagaagacttgtcgccaatggctttgaagatatttttcttaacctgacccagcacaacttcctggttctgggagtcagtagaaacgacgcatggcgcgtcaacgatttcaccggtgaatttaatggtgccgtcaccagattcagcagcgaaagcagaagtggaaactacagcgagagcagacagagcaaaaacaacctttttcattaaaaactccatttatgacggtagataacagaacgcatccttaggattatctgcattctgtgaggaaatggagtgtatagaggtgggtattggatactataattagtatatataaaaataattgttagttaatcttaaaaagaatagaaatcaatatattacaaatggaatgtacataaatgtaattttttattaagaataaattaatataattaatatattatttcttcctattcataaataagttaaatgtcttccttatttattagacgtttttttaactacaattgattaggtatttgtgctaaataaaaaaaagggcaccaaatgggtgcgctgtacgcttggtgttgcatgtgttacgcagacgcttcgctaaccccctcccgctgcggctggcgaatagtggtggaaagtgccagcgagataattaacagcgcaaagataacgcagaaggttagcaccctacttccgccacaagagctgttatcactgcgtttcgattataatttttaagttaaaacctggcgctcacccccaaggtatacaaataatcgctatccgtagcgctattttccgcctgggaaaacgccgcatacgccgccaggtgcgggttaagtaacacgtccgcgcctacggtgacatccagccagtttcccgcctgatttcctgcggtcatacgactcaacccggactgcgctttccagatattctccccaaactgttggttatagctgatttgcgcccagggacggacatcgccgaactgcgagtttacccgccagcctaacgtactgacgctggcgtgccataacggatcggtaaacgctaatgtcgtcgcgctatcgccatattcgttatacattgatgacgtcgaaccgtcgtaatgcagcgccgcgaccggcccagtggtcacgcgtcgggaaagcggaaaattccagcccatactgataccgctggtcgcatcaagcggggtttcatccgccaggctaagcaccggccccaccgtattttgcgtagactgaatacgttcggccagtatgtcgttgtaattcggttggtgatcgctgtcccaggtatagcgttccgtcgtatgccccggagccgcttcagcgatatattcttgttgccaggcatatgtggtattgataaaaaacgagcaggccataaggcccgccagacaacgcaatgtccggcgaccacggcgttttcttacaatcatcaacgcgactccagagtagagccgaattcggcgatattattgtcattgaatgaaggatgtcgggcatcagccctgtattaactattgtccttttagcgggcccgtcaaggcgggttgaaggaaattttcgcggtaaccacaataacgaggaagtctatgcagcgttgcgactgggtcagccaggaccccctttatattgcctatcatgataacgagtggggcgtaccggaaactgacagcagaaagctgtttgaaatgatctgtcttgaaggtcaacaggccggtttatcctggatcaccgtgcttaaaaagagggagaactaccgcgcctgttttcatcagtttgatccggtacgcatcgcagctatgcaggaggaggatgtcgaacacctgctgcagaacacgggcatcatacgacatcgcggtaaaattcaggccattatcagtaacgcccgcgcctggcttgcgatggagcaaaacggcgagtctttcgccgattttgtctggtcattcgttgatggccagccgcagatcacccaggcggccagcctggatgagatccctacctcaacacctgcgtccgatgcgcttgctaaggcattgaaaaaacgcggtttcaagtttgtcggtacgactatctgttactcctttatgcaggcgtgcggactggtcaatgaccatattaccggctgtttttgccatccgggagaaaaacatgattcgcaaatcccagagtgaagacatggcgtctattctggcgctgtggatgaaaagtaccatttatgcccatccctttatcgaagaacgttactggcacgagagcgaagcaattgtacgcgacgtctatttacccgccgcgcaaacctgggtatgggaggaaaatggacaactgaaaggcttcgtcagcgtactggaagcccgttttgtcggggcgctgtttgtcgcccccgacgcgttaagacacggcattggcaaagcgcttctggaatatgtccagcaacgttttcctctgctgagccttgaggtttaccagaaaaatcaatccgccgtaaacttctaccatgcgcttggttttcgtattgaagatagcgcctggcaggaggataccgcccaccccacctggattatgagttggcaggcggatcaaacgccgtaagcggtagcgccgggccggtatatttctcaaaccagaccagcgcggtgttgcccgcacaaccgttccccagccgggaactgggaagatcttttgtcaggacgtttaccgcaccgtttttgcatatgccgcctgcggtaggttcagggtccggccatgcgccttcgtgaatacagatcacgccaggccgaattccgtcggtaacgaccgcgcccgccagaacctgcccgcgatgattccagacgcgtaccgtatcgccatcgacgattccgcgcgttgtcgcatcctgcggatgaatcgtcaccggttcgcgtccggccaccgcataccgctcccgtaacgaactgtagttaagctggctatgcagacggtgcgccggatgcgcggaaagtagctgaacctgccccgcatcggcgttcccgtgccactcatccggcgccagccacatcggatgaccgggacaatccgcataaccatagctggcaatgcgcgcagaatagatttcgattttgccgctggccgtttttagcggatggttatcaggatcgcggcgaaaatccgcgaagcgcacaaactgcgcgttggcgggattttccggcatctccagtaaacggttagcctgccagaatgcggcaaacggcggcagcgtcaccccctggctggcgccacgctgggcggcaatattgtagaaagtctccagccacgccagctcgctttttccttcggtgaaccgagcgtaaccgccggcttcccaccgttcgctcagttcagcaaaaacgtcaaaatcattccgcgcctcccaccggggcgacacgacctgcttcatcggcgccaaatgctgattgctatagtcgccggtcatggttaaatcgttacgctcatagctagtggtcgcaggcagaacaatatccgcgtgtttcgcggcggccgtccagaaacattccgagataacgaccagttccggtttttgccacgcgcgaatcagacggttggtatcctgatgatgggtaaagttcgcgccgcccgcccaccagataaaacgaatatccgggaagcggcgatccatcccattgtgttggtaaaacccaccggggttttccagcgcctcgacaatacgcgccaccggtattttatctaccgcatcgaccccgccagggatgcttccctgcatcgaggctaacacggcggcgcggcgcgtcgggtttccgccgttagcaaaatgataagaaaaaccaaacccgccgccaggcgtaccaatttgccccagcattgcggccagcgtaacgatcatccagtgcttttgctcgccgaactgctgacgctgcattccccagccagccatcaacatggtggtgttatgatgaaatatttctgccagttcgcggattttcaccgcagaaacgccgcaaatttccgccgcccattccgctgttttggccgtaccgtcggtcgtgcccaaaagatagtcggcgaagcggtcataacccgttgtgcagcgggcaaggaacgcttcatcctgccaaccgttttccaccagcgtatgggcgatccccaacattaacgccacatcggtgcccatatgcggggcgatccactccatcttatcgccaaaaaagtcgacgctttccgatcgcatcggatcgatgcagatcaggcgcttgccgctttgtcgcaacgccgcaaaatagtcgagcccctgttcatccgaggcattccaggcaattttcagagtattcagcgggttcgcgctccagagcaccaccacctcgctgtgttccagcaccaccggccagctagtctgctgctggtaaacctcgttgccacccaccacataaggcatgatagcctgcgccgcgccggtggaataatcgccaagatggccggtataccctcccgccagcgccatgtaacgctgcaatagtgtagccgctttatgcaatacgccgttcgaacgccaaccgtaggagccggcgaagatggacgatggcccataactttcgcgaatacgtttgtgctgagcgtggatcagatccagcgcgtcatcccaacttacgcgaacaaactcatcctgcccgcgtatgccttgcggcttatcgggagaagccaggaaccctttacgcaccatcgggaagcgaacccgcgttttactgtgcacctggtcatgcacaacggtttgcagggagttttggtgtgccgtcgggagttcgccatacgaggcaaaaatgcgttctccgtcggtttcaacgcggactggcccccagtgtgcggcggtcaataccgagtgacgcgatggtgcgtgggtcaatgttcgctcctgaattattgggattatttattttgccgatcaatgttacttacaaatttcagagttttccctggaattttcttcatgtgcagacgtcataatcaaccgccacggtcgctgtggtaaaaataaaaaagtgataaggatttaagatgaaaaaacgtgtatttgtgattgctgccatcgtgagcggcgccctggcagtatctggctgcacaacaaacccttacaccggcgaacgcgaagcaggtaaatccggcattggcgcgggtattggatcgctggtcggcgcaggcatcggcgcactctcctcctccaaaaaagatcgcggtaaaggcgcgctgattggcgcggcggctggcgcggcgctgggcggcggcgtgggttactacatggacgtacaggaagcgaaactgcgtgacaaaatgcggggcacaggcgttagcgtgacgcgaagcggcgataatatcattctgaatatgccgaataatgtcaccttcgacagcagcagcgcgacgctgaaaccggcaggcgctaacacgctgaccggcgtggcgatggtgctgaaagagtatcccaagaccgccgtcaatgtggtgggctacaccgacagcaccggtagccacgatctgaatatgcgtctgtcgcaacagcgtgctgactccgtcgccagttcgctgatcacccagggcgttgacgccagccgtatccgtaccagcggaatgggtccggcgaacccgatcgccagcaacagtacggcagaaggtaaagcgcaaaaccgccgcgtcgaaattaccttgagtccattgcagtaaactaccgtaccgggtaaggcggcatgctttacccggcctgcattattccctcgccagaccggatacacctcgcattattcggtattcattcaccatttaccacgatacggctgccgacaacgggaaaatcggctggtcgattattgctaagcgggttaataataagcctgttccggttggcgcatgccgcgcttaccttttgatttacggagagtcgcatgaagccgtccatcattctctacaaaaccctgcctgatgatttgctgcatcgcctggaggcgcattttaccgtcacccaggtaccgaacctgcatccggaaacggtagcgcaacacgcgcaggcatttgccagcgcgcaaggccttctgggcgccagcgaaaccgttaaccgcgcgctgctggaaaaaatgccggcgctacgcgcggcgtcaaccatctcggtgggatacgataatgtcgaggtggacgcccttactgcccgcaaaatagtcctgatgcacacgcctgccgttttgacggaaaccgttgccgatacggtgatggcattgatgctggccactgcccgccgcgtggtggacgtcgcagaacgggttaaggcgggtgaatggacagaaagcattggcccggcgtggtttggcgtcgatgtccatcacaaaacgctcggtatcgttgggatggggcgtatcgggatggcgctggcgcagcgagcgcactttgggtttaccatgccggttctctatcacgcccgtcggcggcatcaggaggcggaagaccggtttaacgcccgctactgcgatctggatacgttgttgcaggaggctgattttgtctgcgtgatcctgccgctaacggcagaaacgcgacatctgtttggcgcaacacagtttgccagaatgaaatcgtccgccatttttattaatgccggacgcggcccggtggtcgatgaaaacgcgctgattgccgcgctgcaaaacggtgaaatatatgcggcaggtctagatgtctttgaacaggaaccgctatctgtggattcgcccctgctgaacatgtctaatgtcgtcgcggtgccgcatattggctcggcaacgcatgagacgcgctacaacatgatggcctgtgcggtggataatttgattgatgcgctgcagggaaaaatagagaagaactgcgtcaatccgcaagcggcgggataacgctacaggcccgataagcgctggcttgcgcttatcgggcagactgtcattactgggtcgcgtttaccgccgccgtccaggcctgattaaacgcctgatgctgcgaggccaacggcccaatcaacgcattatattggctggcctgctgtgaggtcgggaactgaatgccgttcgcgacaaagctcacctgctcgccctgttgcgcaatataatcgcccacttgtaccaactgctgcgtaaagatctgcgccgccgggatcagcggctgcaaagcatctgccggcacggtgactacttttttgtagacctgatcaaacacaggtttcaggtcatcggcctgctttaacgcgccatgcgcggcatcagcctgcagttttgcattctgcaactgttgcgccagcacgcctaacgaaccatttgcctgccgcagcggctcgcgttgcgtcatataatcctgcggaacgcggatggcgttaacgctatcgaccaccgggcgcagaccggaatccatcgcctggtttacctgctgcgagtagccatacagtatcgcgtaatcagacacgaacggaccaaactgttttttctgatcggccgtcagcgttggtaaacgctctccgctacgcattgctgtattctgcaggaaatcgacaaacgctttgcgctgatcgccttctttatcaaaacacccgctcaggctaaacaccattaataacgccacaacaggcgcaaaccagcgagagcaggacttacctgtcgccattgttaatactcctttcacccaaaaatgcgcacaacgacacctgcgtgcctgacggcttacaaggatagtccaggtcaggcttgcaggataccctttccacgcgatcttgtagcggaaaattatgtttatctgcatcaatgcttaatttgttattttattgttaatttttgacctgacactgcgataaaaaacgcggcaagaaagctttccagcggggagtgtaatatttttttaatctttacaattattttctgaaagacggatataccttcctggatcaaattgttagcgtcctaaaagtcgcgtagcgtaaggcatcgaaacgaatcgatagcgcttcctggcggcgcgtcgccccccacccgcaagtttcccgactattcttaagaggcttcgatgcatttcacgatcccgctgtgtgatttacaggagttctcaatggaatataaagatccgatgtttgagctgctgagcagcctggaacaaattgtttttaaagatgaaacgcgaaagatcaccctgacgcaaaaacccaatccttttaccgaatttgaacagttacggagaggaacgggactaaaaacagatgaattcgccagagcgctgggcgtaacggttgccatggttcaggaatgggaatcgaaacgcgaaaaacccacgccagcagagcttaaattaatgcgcctgatacaggcgaacccacgcttaagtaagcaattgatggagtaatttttacccctttctgtttttaacggtcctgcgtaaggaccgttttccccgcccgattactggcctggagaaataaagtaaaataaaagttgcatcgcccgccattacatgagttaatgtgctcaacggtttgacgtacagaccattaaagcagtttagtaaggcaagtcccttcaagagttatccattagatacccctcgtagtgcgcatttccttaacgcttaaaaaatctgtaaagcacgccataacgccgaaaggcacacttattttttaaaaggtaatacactatgtccggtaaaatgactggtatcgtaaaatggttcaacgctgataaaggcttcggctttattactcctgatgacggttctaaagacgtgttcgtacacttctccgctattcagaacgatggttacaaatctctggacgaaggtcagaaagtttccttcaccatcgaaagcggcgctaagggcccggcagctggcaacgtaaccagcctgtaagcttaaaaagctcagcattttgaatccctgcctgatggcggggattttttttattccaattcccccctctcccccagcataactttgcattactttaccctgcgtccctttgacctttcccttaggggaacccctatagtaggcagggagattgttcacaaggaattgaagttatgtcgaaatcatcatggttattacttttgggtttatgcgccagcggctccgcgcttgcggcatcctcagaatccgcttttctggcgcaacatgggctggcgggaaaaacggttgagcagatcgtggatacgattgatcagacgccgcagagccgtcctttgccttactccgcgtcgattaccagtaccgaactcaaattatctgacggagagcagatttatacgctgccgttaggcgacaaattctatctctcttttgcgccctatgaatggcggacacacccctgttttaaccacagcctttccggctgtcagggagaaatgccgaataaaccgttcactgtaaaagtgacagacagtaaaggcgctgtcatcgtacaaaaagagatgcaaagctatcgaaacggatttatcggtgtttggctaccgcgcaatatggaagggacgctggaagtaagctacaacggtaaaacggcgtcacatgccattgccaccagtgatgacagccagacctgtctgacggaattaccattacgttaaaaaaatgcccgataacataatgggttatcgggcctataaaacgccaacaagataaaattaacagagtgccttgagaatgcataacgccacaagaatggcagaggtgggctcactttgtactgaccccaaaaacctggacagattaaccgaggcatcagcgaaagagtccatttaatacatgggctcttttttgtttctggctataactaaataacattgtccgcaatcgaattatccattccgttgctttcttgcatcacgcggattcctgtctcatcaatattttgttcgtcgtattcttcctgaatttaaccttagacattctatcaaattatcgcttatagcgatttgaacataacagtctttgcattctattgagggagcctaaggaacaatgttcgctgctgagtttgtgatgatttgaaaccatggtgaatgtagaaatttttggcttcttcggtaagtgcatgaaccatgattgcacgtacaccaatattctcggcaacccgatagcaacgaagcactgcatcatgaagtaaatcagcaccaagcccttttccatggaatgagagatcgacagcaagacgggcaagtataatgacagggatgggatctggcatgttacgccgaaggttgcctgtcgcttctgtatggttgacgctaccggtggccagagagtaaaaaccggctacttgcttcgtgtctttcttgcacaccacaaatgttctggccgctccgagagcctggtttttgaggcccttttgcttcaaccagtcatcgagcacagcttcaccgctgacgaactcagctacctgatgaaaagcggacaaaggttctggtgctgttacacgtcccactgaggtttccttgccagcagtttttcgataacgggatcatctgcgaccggtgcatcaagcagattgatgaactcctcatattgctcatcgttaaagttaaatacacggcggtcaaggatcactttctcggcagcctggcaggccgtttccagaatgaaatctgtacgtgacttgtgaaggatttccgcagctgcatcaatgagcgcccgctgcgattccttagctctaaggttaagttgaacatctgatttcatgagacaccccttgtatagcatttgctttacaagaatagcacaaccaccatgtatagcaaacggtatacatcaagtcgtcgtttttcattttttgaatactgatgttcgctttgtgccagaagcggaaattgctcattgtagcggtttactgagttcaacaaggcaaaagaacaatgctgcctttctgcaggctgactattatttcgccaaacatttcctcatcagagcattttgtaatgtcactccacggcaaataggaaagcctcgctccactatatgaaagccgtgtcgtagaaagaacacttccgcagccttacttacatttgaagtaagttcactaattccacgctgtctggcttcctcatgaatgcaattcatcagtagtgtccctaccccctgtcttgaataggttcctgatacaaagaaatgatcaatgtatccatttggttgaacatctgcatatccagctatttcaccatccagctctacaacaaaaggttgtaattccttaatgtgattggcccatcgctccaggtcgatatctgctggggcccaagcatcaatttgttcacgtgtgtagtagtgtgatgcgatcgtatgtacagatgagaaaaaaactctgaataacgatatttcatccccattactgaaccttctgattttcataaaacctcattgtgagagttacttgtagaacaatactaatttttgtgaaatagggcgtccgttcctcgctcatagcagacatttgcgtgaccgtatccaccaacgttcaggtttcctgatagcatccctgtacagaccttgttaatttctgcctggatagctctttaggcgctattcaaccgggctgagtccgttaaatttaaggctaattcgtcgggtattgtagtatcgtatgtaatcctcaatagctatcttaagttcatcaatatccttaaatttactggtgtaaaaactttctgattttaaagtcccgaaaaaacattctgcacaggcattatcaaggcagttgcctttgcgggacatactttggatgatgccaaactctcgtaactgatactggtaccatcaatgacggtattgccagccctgatctgaatgaagaaccggattggtacccgcatcaagtctggcagtaccgccagcgttaatgtattcctgaaataattcttgccaatcaatagagataaccgcgtctatgagttacagaattattagcgaatcaactaatactatttatgttataaaaaaacctgcccgagagcaggtttttgtttatttaactgaacgcttattgaagtaacgaaatatccgcaacctgcaggaacagttcgcgtagtttcgacaacagcgtcaggcggttgatacggatatctttctcttccgcgttaaccatgacattttcgaagaattcatccaccggagcgcgcagagcagccagctcaatcaacgcttcctgataacgaccatcggcaaagtacggctgaagcttatcacgcagcacaaccagatgtctggccaactcaatttccgccgcttctttcagtacggaggcgtggacgatatcgttcagcggctcagtggctttcgccaggatgttggagacgcgcttgttcgccgccgccagcgcagaggcttcttccagggtgcggaaatgagacaccgccttcatgcgggcatcaaaatctgccggacgggtcggacgacgcgccagtaccgcctggatagtgtcgacggtgtaaccttcatcctgataccaggcgcggaagcgacccagcataaaatcgatcacatcatcgactacgttggcattggtcagcttgtcgccatacagacgcaccgcttcttcggtcagcgtttgcagatcaagagcgaggttcttctcaacgatgatgcgcagcacgcccagcgcggcacgacgcagcgcaaacgggtctttgtcgcctttcggatgctgaccaataccgaagatacccgccagagtatccatcttatcggcgatcgccagcgcgcaggccaccgggttagacggcaggtcatcaccggcaaagcgtggctgatactgttcgttcagcgccacggccacatcttccgcttcaccatcatggcgcgcgtagtgcatccccatcacgccctgggtgtcggtgaactcgaagaccatgttggtcatcaggtcgcacttggagagcaggcccgcacgagtggcgtggttgacgtcagcgccaatctgaccggcaatccagcccgccagcgcctgaatacggtcggtcttgtcgcgcagcgtgcccagctgttgctggaacagcacggtttgtagacgcggcagatggtcttccagacgttttttacggtcggtattgaagaagaattcagcatctgccagacgcggacgcaccactttctcgttaccggagataatctgggtcggatctttcgactcgatgttggcgacgaagataaagttcggcagcagcttgcccgcgttgtcataaaccgggaaatacttctggtcgcccttcatggtgtacaccagcgcttcggcaggcacggcgaggaatttctcttcgaatttcgccgtcaataccaccggccattccaccagcgaagctacttcttccagcaggctttcgctcaggtcggcattaccgccaatcttacgtgctgcttcttcagcgtccgctttgattttggctttacgcgcttcgtagtcggcaatgactttaccgcgctccagcagaatttgcgggtactggtcagcattgtcgatagtgaactccggctcacccataaagcggtggccgcgaatgacgcggtcagactgaatacccagaatagtcgccggaatgaccttatcgcccaacagcagggtcacggtgtgcaccggacgcacgaagtgtacgtcagacgcgccccagcgcatcagtttcgggatcggtagtttcgccagcgaggtggctaccatgttcggcaccagcgcttcggtactttcgcccttcacgtgggcacgatacagcagccattcgcctttgtcggtcttcagacgctcggcctgatcaacggtgatcccgcagccgcgcgcccagccttctgccgctttgctcggtttgccttcggcgtcaaacgcctgagcaatcgccggaccacgtttttcgacttcgcgatcgggctgagattcagcaagattcgccactttcagcgccagacggcgcggggcggcaaaccattcaacgttaccgtgcgcgaggccggcgttatccagctccgcagtgaagttcgcagcaaaggactcagccaaactgcgcagtgcttttggtggcagctcttcagtgccgatttccaccagaaaagttttctcagacatggccgcctcttacttgtctttgttgcacatcgggaagccgagggcttcacgggaagcataataagcctctgccactgctttggtcagggtgcgaatacgcaaaatgtagcgctgacgttcggtgacggagatagctttacgcgcatccagcaggttgaagctatgggcggctttcagaatacgctcgtaggccggcagcggcagcgggttttccagcgccagcagctgctgggcttctttttcatactgctcgaagcaggtgaataagaaatccacatcggcgtattcaaagttataggtggactgctccacttcgttttgatggaacacgtcgccgtaggtggttttacccagcgggccatcgctccagaccaggtcgtaaacgctgtccacgccctggatatacatcgccagacgttccagaccgtaggtgatttcaccggtcaccggcttgcactccaggccgccgacctgctggaagtaggtgaactgcgtcacttccatgccattcagccacacttcccagccgagtccccaggcgcccagcgtcgggttctcccagttatcttccacgaaacggatatcgtgaatggtcgggtccatacccagctctttcagagaaccgagatacagctcctgaatgttgtccggagacggcttaatcactacctggaactgatagtagtgctgtaagcggttcgggttttcgccgtagcggccatcggtcggacgacgagaaggctgcacataggcagtcgccatcggctctggccccagcgcgcgcaggcaggtcattggatgagaagttcccgcgccgacttccatgtccaatggttgaacaatggtgcagccctggcgagcccagtaatcctgtaaggtcaggatcaagccctggaaggtcctggtatcaaacttttgcatattatttcgtgctggatacgtgtggatttaaaggaaggagccagtatacccgctggatgcgagatatacagtatgaaaccggtttgtttagcgaaaattgccggatttcgcggcatcacacctcaccaggcgcggcttttaccgcatagaaagatgtaaaaactgcccatctgcatcaaaagagcagacaaaactctctttacggaaagtattaccacgcatctcatagctcccctgaaactgttcgaaaccggtaacagcaattttctgtgcgccagtattgtaacgctgcgccgcctgagctttacacaatgcttccatatccagcgtgcgtgttgggctcactttactctgctgggctttttgcgtcggtggaggtgtcgctgtgcatcccaccagagcgatggctatcatcacagaacagaaatacttcattatcatttttattaccgtctggtttgctggtcagtcttattattaaggtttgtgggtagcagacacattgtgcgaatctccttacgccatcacaagatgtagcgtagaaagtcggatttttccagtgagccaccgcgctggaactctattgaaacggaagctgaggaactgatgcagcctaaaattaactggattgataacctgcgagggatcgcctgtttaatggtagtgatgatccatactacaacgtggtacatcaccaacgcccacagcgtcagcccgctaaactgggatattgcgaatgtcctgaattcggcttcgcgcgttagcgttcccctgttttttatgatttcaggctatcttttttttggcgagcgctgcgcgcaaccgcggcattttttacgtatcgccctgtgccttatcttttacagcgttgtcgccctggcttacatttcactttttacttcgatcaacgtcgagctttcgctaaaaaatgtgctgcaaaaacccgtgttttaccacctgtggtttttctttgcgattacggtgatctacctggtatcgccattaatccaggtaaaaaacgtgagcggcaaaatgctcctgatgctgatggtgatcattggtattattgctaacccaaatactgtgccgcaaaaaatcggcggcgttgaatggttgcccatcaatctgtatatcagcggcgacacgttctactacattctctacggtatcctgggccgcgccattggaatgatggagacgcaaaagtcatcgctgacgcttatctgcactgccctgttcatcatcgcggtatttgttatttctcgcggcacattgcatgaattacgctggcgcggaaattttgccgatacctggtatctgtattgcggtcccatggtgtttatttgcgccgtctcactgttcacggtagttaaaaataagctgaatgcgcggacgttacctggactggggcttatctcccgccactcgttgggcatttatggtttccacgcactgattatccatgcgctacgtactaatggtctggagttaaaacgttggccgccgttagacatcgtgtgggtttttgccgcgacggtgacaggaagcctgctactttccatgctgttacagcgtattgataaacggaaatgggttagctaaacgacaatgatggctccggccatcattcatcatcactgtaggaagcgtaaagatcggttccatatatactgacccccagcgccaccagacacagtattttcagcgcgcccgccagcgccaggttaaatacgccgaccgcgaccatgccgatgccaagcaacagcaaagatttgcaacgagaaagcaagcggccatttcccgtgtgttcctggcgaattaagactggaaaaccacacatgacgattgccgcaaaaaaatatcccttttcgcttaatgtatgacagcctggccacagtcccaccaggtataccactgcaccgacaactaacattcccaggccgaatatccgtttcctgcgcgcaacgtgatcgtccatctcactctccttgtggttgtgtgagacacattaagcgaagaaatagcgatgaaaaaggcgcctgctcagcaataatataaaaatcagaaaacacacatacttacttcgatataattcaatagaattaatatttacgggaaatgcctttcagccaaaactgaaaggcattctgacttatgacatcaacggcaacagctgctgataaagtcgacggaaggtttcacgacgttgttgataaaccgcatgacgctgcgcatcaggataatgcgcctgctccagcggcaactgcggcaatacatcggcgagcggggtctgtttattcaccgcaatttgcgccagacgcgccgcgcccagcgctggccctacatcgccgccagtacgataatcaagctgtagcccgctaatatcagatagcatctgacgccagtattcgctgcgcgccccgccgccgataagcgtcacgctggcgggtttgacgccgcaggcgtgaaccacatccataccgtccgccaaagcatatcccacgccctccagtaccgcccgcgccagttccgccgggccatgctgatgggttaaaccaaagaaaacgccttttgcctgcggattattatgcggcgtgcgctcgccggacaggtacggcaaaaaccagatcgaatcggcatgctcatccgcctgctgtgcggcggcaatcagcgccgggacgttctcctgcccggtgagtttagccgcccagtccagacaagaggcggcgctcaacatcacagacattaaatgccagcgttccggcagcgcatggcaaaaactgtgtactgcgctctccggtttactcagaaagccgtcgctgacggcaaaatagacgcccgatgttccgagtgagagcatcgcctgtccggcatcgatcattcctacgccgaccgcgccagccgcattgtcgccgccgcccgccaccacaggtactgctggcattccccatgcgctggccacctccggcagcaacgttccggtaatgtcactaccttcaaataacgctggcatctgctgtcgggttaaatgacaggcgttgagcataacgtcgctccagtcgcgctttttcacgtccagccacatcgttcccgccgcatccgacatatcgctggcaaagacgcctgtcattcgcagccgcagaaaatctttcggcagcagaaccttgtctatctggtagaaaatatccggttcgtggcgctgcacccagactaatttgggcgcggtaaaaccgggcatcatcagattaccggttatcgcacgcgactgcggcacctgtttttccagccaggcgcactcttcgctacagcgtccgtcattccataaaatcgctggtcgcagaacctgctgacggctatcaagcaatgtcgcgccatgcatttgtccggcgatgcccaacgcccggacgccacttaacgactgttgccgacctaaacctttaaccgcacgatccgtcgcctgccaccactgctctggttcctgttccgaccataagggatgcggacgcgatacggtcagtttttcagtatgcgtagccagcacatcgccctgctcattcaacaggatagcttttacacccgatgtaccaagatcgatcccgatatacatagtgtgggttcctttactgaaagcgcccggcagcgctacgcttaccgggctaatcacgactacaggccgggctaacgcggagtcgcccggtagatagggttatttatcaaacagataacggttaaccagattttctaacagctcctgatgaccgctttgatgtactggcgccagattatgctgctccgcatactgcgccagttcgcctaaggagagttgtcctttcagaatctgctgacccagctcgccattccagccggcatagcgcttcgccacgcgtttatccagctcgccgtcttcaaccatacgcgcggcgattttcagcgacaacgccatcgtatccatcgcgccgatatgaccgtagaacagatcgtatttatcggtgctctggcgacgaactttggcgtcgaagttgagaccgcccgtcgtgaatccgcccgctttcaggatttcgtacatcaccagcgcgttctcttcaacgctaatcgggaactgatcggtatcccagcccagttgcgcatcgccgcggttggcgtcaacggagccaaaaatacccagcgcgatagcggttgcgatttcatggtggaacgaatggcccgccagcgtcgcgtggttcgcctcaatgttcactttgatctctttttccaggccgaactgtttgaggaagccatagaccgttgcaacgtcataatcatactgatgttttgtcggttcctgcggtttcggttcaatcagcagtgtgccctggaaacccattttatgtttgtgctcgaccaccatttgcataaagcggccaatctgttcgcgttcctggcgcagatcggtattcagcaacgtttcataaccttcgcgcccgccccacaggacgtaattttcgccgcccagtttatgcgtggcgttcattgccgtaaccacttgcgtcgctgcccagctaaagacttccggatccgggttagtggcggcgcctgcgccatagcgcgggttggtaaagcagttcgccgttccccacagcagttttacgccgctctgctcctgtttcgccgccagcacatccaccatctgcgcgaagttgtttttatattctttcaacgacgcgccttccggcgacacatccacgtcatggaagcagtaaaaaggcacattcagtttgtggaaaaattcaaacgccacatccgctttgcgtttcgccagctccagcgcttcgcccggttgctgccacggacgattaaacgcgcctacaccaaacatatccgcgccgttccagcagaaggtatgccagtaacaggccgcgaaacgcaggtgatcttccatacgtttacctaaaaccagctcgtcgggattgtaatgacgaaatgccagcgggttagtcgattgagggccttcatagcgaacacgatcgagttggtcaaaataagcctgcatagtgagctccataatcagataagacggcaagtaaacgacataacgtcatactggaatttcctgatttattgctcaattacgttatttcacaccgctattaagagaatccccaaatgtgctctggctctcaaaaaaacgctgaaaaccacagaagaaaaaagcgatcgcgatcgaatcctggcaaataaacaaaaaaccgtaatatatagataagaaatgacaattgtcatccgccgtttgctgtgatgaatttcgcataacgtttcaggcgcaaaataatttgtcatcattcgccagaccgttatgtcagccgttttgatagtatccatgagtccaggttcacttttgcaggatatatcctcatgtttgataaacgtcaccgtatcactctgttatttaacgcgaataaagcctatgaccgtcaggtagtggagggggtgggtgaatatttacaagcctcgcaatccgaatgggatatatttattgaggaagatttccgtgcccgtatcgataacattaaagagtggttaggcgacggcgttattgccgattacgatgatgacgatatcgcgcaattattggccgatgtcgacgtacccattgtcggggtcggcggttcttaccatcttgctgaaaattatcctgccgttcattacatcgccaccgataatcatgcgctcgttgaaagcgctttcctgcatttaaaagaaaaaggcgttaaccgcttcgcgttttacggtttgcccaactccagccgcaaacattgggcggcggaacgggaatacgcctttcgccagctggtcgccgaggaaaaataccgcggcgtagtctatcaggggctggaaaccgcgccggaaaactggcagcacgcgcaaaatcgcctcgccgactggcttcagacgctgccgccgcaaaccggcatcattgccgtaacggatgcccgcgcccgtcacgtattgcaggcctgcgaacacctgcatattccggtgccggaaaaactttgcgttatcggtattgataacgaagagttaacccgttacctgtcgcgcgtcgcgctttcctccgtcgcgcagggggcgcggcaaatgggctatcaggcggcgaagctgctgcaccgtttgctggcgcgtgaagagatgcctttacagcgcattctggtgccgccggtgcgcgtcattgcgcgccgctcgacagactatcgctccctgaccgatccggcggttatccaggcgatgcactttattcgtaaccatgcctgtaagggcattaaagtcgagcaggtgctggacgcggttgggatttcacgttcaaacctggaaaaacgttttaaggaagaagttggcgagacgatacatgcgctgatccacgccgaaaagctggaaaaagcgcgtagtttgttgatttctaccacgttggcgataaacgaaatttcgcaaatgtgcggctacccgtcgctgcaatatttctattcggtgtttaaaaaggagtacgtcactacgccgaaggagtatcgcgaccagcatagtgaagcgttgttgtagtttatccagcctacagatgccttgtaagccggatagcgtagcgccatccggcacacagaattacatatgcgcggcgatcagacgctggttgtcctggtacatcgcgaacaagtagttgttatagcgcgacccctgggtagagtaacccttcagcttatgaatcatcgccgtggcggtgacttcctgatccgccttacgcagttgggcgcgcgacttgcggaaagaagaataagccggatgcgtgttcaggttggcgacatacgcgctcaccgactcctcaaccgacgcgaattgcgagtaacctttcaccttacccggcgtattggtacaacgccctttcgtgcacttcatgccgaacaggttattgttgctacgcgccagtttagaggttccccagccgctttccgccgccgccatcgtcgccaccatgctggttgggataatgtcgacgcgctccagcaacgtattccacggaatacgacgcgtgttgccggaccagctcactttatagcgcttcgcgatatctttcatacgcgcgcgttcagacggcgaccagcggttctggtactgttttgagatcagccaattacggtccgcggtaatcgcggcattttggctggtgatgtaaggcataacggtccggagaaacgctttttttctgggggttccggaagggtattttcgcaaatcaggaagtgaactgctctttgcactattgcgagaatactcttgtttactgctaacctgtttataacttgtctcagttatgtgggacttttgactcgtttgtgttgcgtgcgtctttgccagcacctcacccgaaaatgcgatggtgagtaacataagaatcattgccccatatcgtcgcatgggagtcaatatcattaggtctcctggtcggattgatacattccaacaccttttatttttcacgaagttgaggtttgaaccccaaattctagcaaaaataggcttaaaaagcacctcagggaatagtcttaatccgaaactatgtcaagtattaacgataacaggcagcaataatgccaataaaatgtggtgcttatcgcaaatagaggcgtttttttgcgcctcgtcgctcaccctcgcgtctcctcctgcgcgactctctgctgaggaggagttcattcgcctaaaaaccaggcaagctgatgaatattgcccacaaaggatagcgtgatgaaacttgccgccttcgctctgacgctgatacccggtatcgcgatcgcctcatcatggacctcacccggttttccgacgttctcgacgcaggaaaccgggcgctttaccagccatgctgcattaacaaaaggtacacgcgcgttaacgctccatattgaccagcagtgctggcagccctccggcgccataaaactcaaccaaatgttgtcgttaaaaccctgcgaaggcgcgccgccgcaatggcgtttgtttaaagatggcgactatacgataacggtagatacccgctccggtacgccgaccctgttgttatcgataaaaactgaacctgaacgcaccgcgcagctcgcctaccagtgtcccgtctgggatgggtcgccgctcacgctggatgttcgccaaacctttccggaagggacggtagtgcgcgattattacagtggtcaaaccgataccgtccaaaacgggcaaatcacgctgcaacctgccgacagccacgggcttttattgctggaacgcgcggaaacccatgcgccggcgccttttaactggcgcaacgccaccgtttattttgtgcttacggatcgctttcgcaatggcgatccaaccaacgaccacagctatagtcgccataaggatggtatgcaagagattggcactttccacggcggcgatttgcgcgggttgacgagtcaactggactatctacagcaattaggcgtgaacgccttgtggataagctcgccgtttgaacagatccacggctgggtcggcggcgggacaaaaggcgattttcctcattacgcctatcacggctattacactcaagactggacgacgctggatgccaatatgggcagcgaagccgatctccgcgcgctggtcgacggcgcgcaccagcgcggcatccgtattttatttgacgtagtaatgaatcatgccggttacgccacgctggcggatatgcaggagtatcagttcggcgcgctctatttatccggcgcggaacggcaaaaaattctcggcgatcgctggacaaactggcgacccgccgccggacaaagctggcacagctttaacgactacatcaacttcagcgacagcgccgcctgggaaaaatggtgggggaaaaagtggattcgtaccgatattggcgactacgacagtccgggatttgacgatttaaccctgtcgctggccttcctgccggatataaaaacggaatctaccacgccttccggtctacccgcgttctatgccaacaaacccgatactaaagcaaagttcattgagggctatacgccacgggattatctgactcactggttaagccagtgggtacatgattacggcattgacgggttccgggtcgatactgccaaaaacgttgagcttcctgcctggcaacagctaaaaacccaggccagcgcggcgttacgtgaatggaagcaggccaatccggacaaagcgctggataatagcccgttctggatgactggcgaagcgtggggccacggcgtcatgaaaagtgattattatcgctatggtttcgacgcgatgatcaattttgattatcaggagcaggcggcgaaagcggtcgattgcctggcggaaatggggccagtctggcagcagatgacggataaaatgcaggatttcaacgtattaagttacctctcctcgcatgatacgcgccttttccgtgagggcggtgataaggcggcggaactgctgctgctttcgccaggcgcggtgcagatcttttacggcgatgaatccgctcgtcccttcggccccaccggctccgacccgctgcaaggcacccgttcagatatgaactggcaggacgtgagcggaaagtcagccgcagccgtcgcgcactggcagcgtattagccagttccgcgccagacatcccgccatcggcgcaggccaacaaaccacgctgacgctaaaacacgggtacggttttgtacgccagtacggcgacgatacggtgatggtcgtctgggcgggccgccgctaatcgtggcgctaccggtctcctcgcgtaccggtagccccttcaaaacaaaaaactaacctgataaaaatttgtagcataaaacatcaacaccaccgcctgacccccatttgcgccccgccatttgtagcgttatggttatccactttgacagacagttcgatagatcacccgttatgacattttcacttttcggcgataaatttacccgccattcaggcattacccgcctgatggaggatctcaacgacggcttacgcacgccaggcgccatcatgcttggcggcggtaacccggcacacatccctgcaatgcaggattatttccagacgctactgacagatatggtagaaagcggcaaagccgctgatgcgctttgtaattatgacggtccccagggaaaaacggcgctactgaatgcactggccgtactgctacgtgaaacgctgggatgggatatcgaaccacagaatattgcgctgacaaatggcagtcagagcgcgtttttctacttatttaatctcttcgccggacgtcgcgccgacggcagtacgaaaaaggtactattcccgcttgcgccggaatacatcggctatgcagattccggtctggaagacgacctcttcgtttcggcgcggccgaatattgaactgctgccggaaggccagtttaagtatcacgtcgattttgagcatctgcacatcggcgaagaaacggggatgatttgcgtctcgcgcccaaccaacccaaccggtaacgttatcaccgacgaagagctgatgaagctggacagactggcgaatcagcacaacatcccactggtgattgataacgcttacggtgtaccgtttccgggcattatctttagcgaggcgcgcccgctgtggaaccccaatattatcctatgcatgagcctctcgaagctggggctgcccggttcccgctgcgggattatcatcgccaatgataagacgattaccgccattgccaacatgaacggcatcatcagccttgcgcccgggggcatgggcccggcgatgatgtgcgaaatgattaagcgtaacgatctgctgcggctgtcggaaacggttatcaaacctttctactatcagcgcgttcaacagacgatcgcgatcattcgtcgctatttatccgaagaacgctgcctgattcataaaccagaaggcgcaatatttttgtggctgtggtttaaagatctgccgattaccaccgagttactctatcaacgcttgaaagcgcgcggcgtgctgatggtgccgggccactatttctttcccggactggataaaccctggccgcacacacaccagtgtatgcggatgaactacgtgcctgaaccggacaaaatcgaggcgggcgtaaaaattctggcagaagagatagaacgcgcctggcgtgaaggctgacggttattccggccatcatgcaggccggaacgacgttcagaaaggttgagaatagaggcgctggcgctgcacgtgtgctgcgtcaacgcactgtaacgcactggtcgggcaggcttccacgcacgccggccccgcttcccgatgccagcaaagatcgcatttaatcgcctgcgcgcctgacgcggacgccaccacagtcatcgcgccaaacgggcaagccagcatacagcttttacaaccaatgcagcgcgatgacgtcacgaagatatgcccccgatcacggcgaatcgcctgtaccgggcagacatttgcgcacggcgcgtcctcacactgatggcagaccgtggccgtggtgaagctatcctcttttatcacccggatacgcggcacaaagtccgccgtcgtcaccgccgcgctattctgctgttcctggtgcgacaccacgcaggcgacctcgcaggtacgacacccgatacacgccgacgcatccgccataataaaccggttcattgttctccccctgcgttaaaacgccagaatgccagagagccattccccgccgctttgatcccactacgcaaacggacaaattttgtcagatgcctgataaaacctggcgagctgtcttattcgcgaacggtaaatcccagctcgttagagatagcctgtgcggtttcacgcaacggtttgagcagatttttctcgccgatctgttttagccgtgacgtcgacagtgaaatagaaatggcgtaaggcactcgatggtgaatatcaaacacaggcacagcaatacaggaaacgcctagttcattttcttcgcgatccatcgccatgctggtttcacgaatttgcgccagctcatcgtacattgctggtaaatcggtaatggtattacgagtcagcggctggatctgatctttatggctttcccagtaagacgccacataatccggctgaccaaacgccatataaattttccccatcgccgagcagtacagcggcatatgctggccaatgtaggcacgcgtgcgcagcataccggtggtcggttccagcttataaatcaggatagcgtggtcatcttcacggctggaaaaattcaccgtctcgccggtggtcaggttgagcgcctcaaggtgcggtgccgcaacgtggatgatattcagcgatgacagggctttttggccgacggcaataaactttgtcgtcagacggtagctcccggccgccggcgctggcgtcacatatccgcaggattgaagcccctgcaacaaacgatggacggtactcttgttcagccccgccagctccgacaggtgcgccagcgggcaaccgttcgggtagttactcaaaatttctatcaacatcaggccacgaaacaggctctgactccccgcaggcttctctttatcgttgttctggctcatcagaaaactctctcctttcttgggcgatcagatggtagctcaaagtgtgttgcagttcacgatatcagcataaaaaacataacccgatgattttaatcatttttaaaaaccttctctggcgttgccatgtcaatttttgatctatatatttggaactagatttcgcattatgaaatttatagacaaaaaaacatactaaaatttctaacaatcgaccaggagaacagggatgaaagtaactttcgaagagttaaaaggggccttctaccgcgtcttgcggtcgcggaatattgcggaagataccgccgacgagtgcgcggaaatgttcgctcgcaccaccgagtccggtgtctattcccacggcgtgaaccgctttcctcgcttcatccagcaactggataacggcgacattattcctgatgctaaaccgcagcgggttaccagcctcggcgccatcgaacagtgggatgctcagcgcgctatcggcaacctgacggcgaaaaagatgatggaccgggccatcgagctggcttccgatcatggtattggcctggtggcgttacgtaatgctaaccactggatgcgcggcggcagctacggctggcaggcggcggaaaaaggctatatcggcatttgctggaccaactccatcgccgtcatgccgccgtggggggcgaaagagtgccgtatcggtaccaatccgctgatcgtcgccatcccgtctacgccgatcacgatggtagatatgtcgatgtcgatgttctcctacggaatgttagaagttaaccgtctggcgggccgcgaactgccggtggacggcggtttcgacgataacggtcagttgaccaaagaaccgggcgttatcgagaaaaatcgccgcattttaccgatgggttactggaaaggatctggtctgtcgattgtgctggacatgattgccaccctgctttccaacggctcttccgttgccgaagtgacccaggaaaacagcgatgaatatggcgtctcgcagattttcatcgccatagaagtggataagctgatcgatggcgcaacccgcgacgccaaactgcagcggattatggatttcatcaccaccgctgaacgcgccgacgacaacgtcgcgattcggctgcccggccacgaatttaccaaactgctggatgacaaccgccgtcacggtatcaccattgacgacagcgtctgggctaaaattcaggcgctgtaaggagccacatcatgatttttggacatatcgcgcagcctgatccgtgccggttaccgtcggccatagagcaggcgctcgatttcctgcgtaatacggactttcgcacgctggaacctggcgtagtggaaatcgacggcaaaaatatcttcgcgcagattatcgatatgaccacccgcgatgctgctgaaaatcgtccggaagtccatcgccgctatctggatattcagtttctggcatggggtgaagagaaaattggggttgccattgataccggtaataatcaaatcagcgagtcattattagaacagcgcgatattattttttatcacgacagtgaacatgaatcattcattgaaatgataccgggaagttatgccctgtttttcccgcaggatgttcatcgtccaggttgtaataaaagcattgctacgccgatacggaaaatagtcgtaaaagtcgccatagacgttttataaaatagagtttactggagcacaaaatgaaaaataataccggttatattatcggtgcgtacccttgtgcaccctcatttcaccagaagagtgaagaggaagagacggaattctggcggcaactctctgatactccggatatccgggggctggagcagccttgtcttgaacatcttcacccgctcggcgacgagtggttattgcgccatacaccagggaactggcaaatcgtggtcaccgcgataatggaaaccatgcgccgccgtagcgaaaacggcggttttggattagcgtccagtgacgaggaacagcgtaaagcctgcgtggaatactaccgtcatctttatcagaagatcaataaaatcaatgggaacaataccggcaaagtcatagcccttgagcttcatgccgccccgctggcgggcaatccgaacgtggcgcaggcaaccgacgcctttgcgcgctcattaaaagagattgccaactgggactggtcctgcgacctggtgcttgaacactgcgacgcgatgaccggccccgcaccgcgcaaaggattcttaccgttggtaaacgtactggaaactattgccgactatgacataagcgtctgcattaactgggcgcgctcggctattgaagggcgggatacctctctaccgctgatccacacgcagcaggccaaacaggctggaaaactcggggcactgatgttctccggtacaacgctggatggagaatacggcgaatggcaggacctccatgctccgtttgcacctttctgtccacaaagtctgatgacggagaaacatgttaaagaactgattaccgccgccgctcccgaactgttgcagtttaccggtattaaattgttggaaatcaatgccagtgccgatattaatcaccgcataaatatattacgcgatggtattaacatgatgaaaaaggccacacgccgctaacctgaattaaacatcatcaccttaattctcggcctgcaactcaacgttgcgccgacctaatataaaccaaacataagaaattaagttccactattcagcatcgaaagaaataagtttctataacctgatggagtcgttatgaagcgggtacttgagggcatacttgcggtattaattgccgtactttcctgcattgtatttattaacgttattttacgttacggttttgagagcagtattttgtcggtagatgaactatcacgttatctatttgtatggctgacgtttattggcgccatcgttgcatttatggataacgctcacgttcaggtcacttttgtggtggaaaaactttcgccagcgaatcagcgtcgtctctcgctgctgacgcattcgctgattttattgttatgcatcgcattaggctggggcagcctgcaaaaagcgttgcaggactggagcgatcactcgccaatcctcggtttaccgatcggcctgatgtatatcgcctgtctgcccacaagcgttgccatcgcgttaatcgagctgcgtcggctttatcacttaataacgcgtaacgattcctttcaacaaccacagcaaggagcctaatcatggccgtggtgatatttctctgctgcctgctcggcgggatcgcgataggtttacccatcgcctggtcgctgctgctttgcggcgctgctctgatggcatacctggatatgtttgacgtgcagattatggcgcaaaccctggttaacggcgcggacagtttctccctactggccattcccttttttgttttggccggtgaaatcatgaacgcgggcggcctgtcaaagcgaattgtcgacctgccgatgaagctggtcggccataagcccggcggcctgggctacgtgggcgttattgcggcaatgattatggccagcctttccggctctgcggtagcagataccgctgcggtcgccgcgctgctggtgccgatgatgcgctccgcaaactacccgatcaaccgctccgttgggttaatcgcttccggcgggatcattgcgccaattattcccccctcgattccttttattatcttcggcgtttccagcggcttgtcgatcagcaagctgtttatggccgggatcgcaccgggcatcatgatgggcgcggcgcttatgctcacctggtggtggcaggccgggcgattaaatctcccttctcagcctaaagcaacaccgcgtgaaatctggcaatcattggtttcaggtatctgggcgctgtttttaccggtgattatcatcggcggcttccgttccggacttttcacgccaacggaggcaggggcggtcgccgcgttttacgccctctttgtcgccgtggttatctatcgggaattaacgttttccagtctctaccacgtgctggtcaatgccgccaaaacgacgtcagtcgtcatgtttctggtggctgcggcccaggtatccgcctggctgattacgatcgcggaattacccatgatggtgtcagatttgctgcagccgctggtcgactctccgcgactcttatttatcgtcattatgatctcaattatggtcgtcggtatggtgatggatttgacgccaacggtgttaattcttacccctgtattattgccattagttaaagaagccaatattgacccgatttatttcggcgtcatgttcattattaactgctctattggattaatcacaccgcccgttggcaacgtcctcaacgttatttccggggtagcaaaattgaaatttgatgacgcggtaagaggcgtattcccttacgttgtcgtcctgatgtcgctgctggttttatttatttttattcccgagctaattatcacaccgcttaaatggattaattaaaggataatattatgaaattacacgttattgctcgttcattattgatagctggtctgacggttttcagcgtgtcgtctctggcggcgcaatctttacgttttggttatgaaacaccgcaaactgactcccaacatattgccgcgaaaaaatttaacgaactattaaaagaaaaaactaacggcgaattaacgctaaaactctttcctgacagcacattaggtaacgcccaggcaatgatcagcggggtgcgcggcggaaccattgatatggaaatgtccggttcgaacaatttcaccggcctggcccctgtattcaacttacttgatgtccccttcctgtttcgcgataccgcgcatgcgcataaaacgctcgacggcaaagtcggcgatgaactgaaaaaatcactcgattcaaaagggttaaaagtgctggcctactgggaaaacggctggcgcgacgtcaccaactcccgcgcgccggtaaaaacgccgggcgatttgaaaggcttaaaaatccgcactaacaacagcccaatgaatatcgcggcctttaaaatcttcggcgcgaaccctattccgatgccattctccgaagtctataccggcctcgaaacccgtacgattgatgcccaggaacaccctatcaacgtcgtgtggtcagcgaaattctatgaggtacagaaatacctctccctcactcatcacgcctattcgcctctgctgctggtgatcaataaagccaaattcgacgctttaagcccgcagttccaggaggcactgctgagttccgccaaagaagcgggtgactatcagcgcaaactggtcgccgaagatcagcaaaaaattatcgatggcatgaaagaagccgaagttgaagtcctgaccgatatcgaccgtaaagccttcagcgatgcgctgggcagccaggtgcgcgatatgttcctgaaagacaacccgcagggcgccgatctcctgaaagccgtggacgaggtgcaataagtcatgagcaactactggctggggttagattgtggtgggagttggctaaaagccgggttgtacgatggcgcaggccgggaagtagcggtgcaacgcctgccgctgcacgctttaagcccgcagccaggctgggttgaacgcgatatgaccgagctgtggcaacagtgcgcctcggtcatcagcaaactgctggcgcacacgggggtgagcggctcacaaatccgcggtctgggtatttccgctcagggtaagggcctgttcctgttagataaaagcgatcggccattaggtaaagcgatactctcttccgaccgtcgcgccatggaaattgtccagcgctggcaaaaagaagcggttccgcaaaaactctacccgctgacccggcaaaccctgtggaccgggcatccagtctcccttttacgctgggtaaaagagaatgagccgcagcgctacgcgcagataggctgcgtcatgatgacgcatgactatctgcgctggtgcttaaccggcgtgaaaggctgtgaggagagcaacatctccgagtccaacctctacaacatggcgacgggccagtacgacccgcgtctgaccgagtggctgggcatcagtgaaatcgacagcgcgctgtcccccgtggtgggttcagccgaaatatgcggggagatcaccgctcaggcagccgccatcaccggtctggcggcgggtacccccgtcgtcggcggcctgtttgatgtggtttccaccgccctttgcgccggtattgaggatgaatcgaccctcaatgcggtgatgggcacctgggccgtcaccagcggcatcgctcacggcctgcgcgaccatgaggcccacccttacgtctatggccgctacgtcaatgacgggcagtatatcgttcacgaagccagcccgacctcctccggcaaccttgaatggtttaccgcccagtggggcgacctctcttttgacgagatcaatcaggcggtcgccagcctgccgaaagccggtagcgaccttttttttctgccgtttctctacggcagcaatgccggactggagatgacctgcggtttttacggcatgcaggcgctgcacaaccgcgcgcacctgctacaggcgctctatgaaggcgtggtcttcagccatatgacccacctcaaccgcatgcgtgaacgctttaccgaggtttgcgccctgcgcgttaccggcggcccggcccactccgacgtctggatgcagatgctggcggacgtcagcggtttacgcattgagctgccgcaggtggaggagaccggctgcttcggcgcggcgctggctgcccgcgtcggcaccggcgtatatcgcgatttccgcgaggcccaacgcgacctgcagcacccggtgcgcacgctgctgccggacatgaccgcgcacgccctctaccagcgcaaataccgccaataccaggatttgattgaagcactacagggctatcacgcccgtattaaggagcacgcattatgagccgaccattactgcaactggcgctcgaccacaccagtctggaagcagcccaacgcgatgtcgccctgctacaggatcatgtcgatatcgttgaggccggaaccatcctttgtttaaccgaaggccttagcgcggtgaaagccctgcgagcgcagtgcccggaaaaaatcatcgtcgccgactggaaagtggccgatgccggtgaaaccctggcgcagcaggcttttggcgctggcgctaactggatgactatcatctgcgccgcgccgctcgcgaccgtcgagaaaggccatgccgtcgcgcaatcctgcggcggtgaaattcaaatggagctgttcggcaactggacgctggacgacgcccgagactggtatcgcaccggcgtgcgtcaggcgatttatcatcgcggacgcgatgcgcaggccagcgggcaacagtggggagaagcggacctggcacgcatgaaggcgttgtccgacatcggccttgaactatcgattaccggcggcattaccccagcggatctgccgctgttccgcgacattaacgttaaggcatttatcgccggacgtgcgctggcaggtgccgcccatccggcgcaggtcgccgccgaattccacgcccaaattgacgccatttggggagaaaagcatgcgtaatcatccattaggtatttacgagaaagcactggcgaaagacctcagttggccagagcggctggtgctggcaaaaagctgcggttttgattttgtcgagatgtcggtggatgaaaccgacgaacgcctttctcgcctggagtggacgccagcccaacgcgcatcgctggtgaacgcgatgctggaaagcggcgtcgctatcccgtcaatgtgtctctccgcccatcgccgtttcccttttggcagccgcgacgaagcggtacgccagcgggcgcgtgaaatcatgaccaaagccattcgcctggcgcgcgacctggggatccgcaccatccagttggcaggttacgacgtctattacgaagagcacgacgaaggcacccagcaacgtttcgccgaagggctggcgtgggcggtggaacaggccgcagcggcgcaggtgatgctggcggtggagatcatggataccgcgtttatgaactccatcagcaagtggaaaaagtgggacgagatgctttcgtcaccgtggttcaccgtttatccagacgtcggcaacctcagcgcctgggggaacgacgtgaccgccgagctgaagctgggtattgaccgtatcgccgctatccacctgaaagacacgctgccggtgaccggtgacagccccggccagttccgcgacgtgccgtttggcgaaggatgcgttgattttgtcggcatcttcaaaacgctgcatgagctgaattatcgcggttcatttctgattgagatgtggacagagaaagccagcgagccggtgctggaaattatccaggcccgacgctggattgaatcacggatgcaggaaggaggtttcacatgttagagcaactgaaagccgaggtgctggcggccaacctggccctcccggcgcacgggctggtcacctttacctggggcaacgtcagcgcggtcgatgagacgcgcaaactgatggtcatcaagccttccggcgttgaatatgaggtgatgaccgccgacgatatggtggtggtagagatcgccagcggtaaggtcgttgaaggccataaaaaaccgtcgtccgataccgcgacccatctggcgctctatcgccgctatccgcagatcggtgggatcgtgcatacccattcccgccatgcgacgatctggtcgcaggccgggctcgatctgcccgcctggggcaccacccacgccgactatttctatggcgcgatcccctgtacccggctgatgaccgttgaggaaattaacggcgagtacgagtatcagaccggcgaggtgattattaaaacctttgaagagcgcggtctcgatccggcgcaaatcccggcggtattggttcattcgcacggcccgtttgcctggggtaaaaatgccgccgatgccgtccacaacgccgtggtgcttgaggagtgtgcctatatggggctgttctcgcgccagctggccccgcagctaccggatatgcagcctgaactgctcgataaacactatctgcgtaaacacggcgcgaatgcctattacgggcagtaatgccggcagccacagcctgtgtcagatggcggctgcgccttatccgacctacaagatttgcaatatcaatacgttgtgatgaactcttgtaggcccgataagcaaagcgccatcgggcattcagtttgcaaccgctttgtcagagggccaaagattatactcaagaattaacgtgttccttactgtagcgccgcttccaggcggtaggcgtcaggccggtgtgcttgcggaagatctggcgaaagtaaccaacgtcattaaaaccgcaccgttccgccacctcttttaacgaacgcgcgtcgctaatcagcaacttttccgcctcgcgcacccgctggcggtggatggcttccgttagcgtaaggtgaaatacccgccgataaacgcgtcccagataatccacattgcaatgcagttctttcgccagaaccgcgctggaaagcggcaggtgatagtgcgttcgaatcagctgctgcgctttccaggccagcgacacgccagcggcctcggcgttttcattctgccgggcgtcaacggtgagctgctgcaaaatcagcagcacgatgaactccagcgccgggctgcgctggtgcttttcctgctcgttcataaactggcgaaaaagcgcaatcagcgcctgcggatcggcaacctgggtatgctgcggcacggaaagatgcgtcagccagcgcgggtcgctgtccggcgctttgacctcaaaatggagccagtaaaatttaagatcggcgggaaactcctcaacgccaatatggcggcgatgcggccaaagcaacaggctttccccggcttcgacacagaaaacacattcttcttcctgaattttcaggcagcctttttccacaaatataatttcccacgattgcagacgcctggctggatgacgcccaataccgcgagaaataaataatccgccgttttggactttaatcggtaatgttatggataattcgagcattaatatgtcatttcccgctcattcagcaccgtatttcatattagcttttgattattaactaaaaatagtcatttcactcgatccatctcacatttttaaatgcgggtcggaatcgtcatctttttttactcttttatcgccttgtcgctcaccgctatctgggcaaaatgaatcaggtcataacgcgaaaataaaaattactgccataaaataccccgtcagcgaggaatatctatgacctctacagccttaaggagcacgaaatgaacgtactggaagtcgatctgcataaactgacggtcagcgatccgttcctcggacagtatcaacaactggttcgcgatgtggttattccttaccagtgggatgcgttaaacgatcgtattccagaggctgaacccagccatgccattgaaaatttccgcattgccgcaggccagcagacgggcgacttttacggcatggtctttcaggacagcgacgtggcgaaatggctggaagcggttgcctggtcactgtgccagaagcccgatccagcgcttgagaaaaccgccgatgaggtgattgaactggtggccgccgcgcagtgtgacgatggctatctcaatacgtactttacggcaaaagccccgcaagaacgctggagcaacctggcggagtgccatgagctttattgcgccgggcatctgattgaagcgggcgtcgccttctttcaggccaccggcaagcgtcggctgctagacgtcgtttgtcgcctggccgatcatatcgacagcactttcggccctggcgaaaatcagctgcacggctatccgggccacccggaaattgagctggcgctgatgcgtctgtatgaggtaacagagcagccgcgctatatgacgctggcaagctactttatcgggcagcgcggcgcccaaccgcacttctacgacgaagagtacgaaaaacgcggccaaacctcttactggcatacctacggcccggcgtggatggtcaaagacaaagcctacagccaggcgcatctgccaatttcgcagcagcagacggcaatcggccacgcggtacgttttgtctatctgatgactggcgtggcgcatctcgctcgcctgagcaacgatgaaggcaaacgccaggactgcctgcgtctgtggaaaaatatggcgcagcgtcagctgtatatcaccggaggcatcggttcccagagcagcggcgaagcctttagcagcgattacgatttaccgaatgattcggtctatgcggaaagttgcgcttcaatcggcctgatgatgttcgcccgccggatgctggaaatggaagccgatagccagtacgccgacgtgatggagcgcgcgctgtacaacaccgtcctcggtggtatggcgctggatggcaagcatttcttctacgtcaacccgctggaagtgcatccaaaatcgttaaaattcaaccatatttacgatcacgttaagcccatccgccggcgctggtttggctgcgcctgctgcccgccgaacatcgcccgcgtgctcacctcccttggtcactacatctacacgccgcgtgcggatgcgctgtacatcaatatgtacgtgggtaacagcatggaaataccggttgaaaatggcgcgctcaaactgcgaatcagcgggaactacccgtggcatgagcaggtgaagatcgccatcgactctgtgcagccggtacgtcacacgctggcgctacgtctgccggactggtgccctgaggcaaaagtgacgctcaacgggctggatgtggagcaggatattcgcaaaggttatctgcatatccgtcgaacctggcaggagggcgatacgataaccctgacgctgccgatgccggttcgccgcgtgtatggcaatccgctggcgcgtcacgtcgccggtaaggttgccattcagcgcgggccgctggtctattgccttgagcaggccgataacggcgaagagctgcataatctgtggctaccgaaagagagtgagttccgggtctttgagggcaaagggctttttgcgcataagatgctgattcaggctgaaggcgagaagcaaagcgccccagatgcgcagcatcaggcgttgtggcactacgataacgcgccgtcatcgcgccagccgcagacgctaaccttcattccgtggtttagctgggccaaccgtggcgagggcgaaatgcggatttgggttaacgagcggtaatactgtgccggatggcggctgcgccttatccggcctacaatatttgcaatatcagtatattgcgataaattcttgtaggcccgataagcgaagcgccatcgggcattacctcttgcgtcagaacagccccagaggcttatcggaatagctcaccagcaggcacttggtttgctggtagtgttccagcatcatcttatgcgtttcgcgcccgatgcccgactgcttatagccgccgaacgcagcatgtgccggataggcgtgatagcagttggtccatacgcgcccggcctgaatgccgcgccccatcttataggccagattgccgttgcggctccagacgccggcgccgaggccatactgcgtatcgttagcgatttccagcgcctcctccatggttttaaaggtggttaccgccagcactgggccaaagatctcctcctgaaagacgcgcatattgttcttaccaaacagaatggtaggctcaaggtaatagccctctttaagttcgccatccagctccttgcgtcgcccaccggtcagaatatcggccccctcttttttaccgatatcgatataattgaggatagtctcaagctggccgtgggagacctgcgcccccatctgtgtaccgctatctagcgggttcccgctgcgaatgctctccacccggcgaatagcgcgttccataaagcgctcatagatggactcctggaccagcgcacggcttggacaggtacacacctcgccctggttaaaggcaaacagggcaaatccctccagcgctttatcaaagaacgcatcttcctcatccatcacgtcagcaaagaagatattgggcgatttaccgcctaactccagcgtcaccggaataatgttctgcgtggcgtactgcatgatctgttgacccacttccgtcgaaccggtaaacgccaccttcgcgatacgtttcgaggtcgccagatattcgccaatctcgccgcccgcgccgttcacgacgttgacgacgcccggcggtaacagatcgccaatgatttccatcaacagcaaaacggaaagcggcgtcaggcgtgccggtttaagcaccacgcagttacccgccgccagcgctggcgccattttccagcttgccatcaacaacggaaagttccacgggattatctgccccacgacgccaagcggttcgtgaaaatggtaggccacggtttcgctatcaacttcgctaatcccgccctcctgcgcacgtatacaggaggcgaaatagcggaaatgatcgatcgccagcggtacgtcggcggcgctggtttcacgaatcggtttaccgttatcccaggtttccgctgtcgccaacagttcgaggttttgttccatccgatcggcgatcttaaacaagatagcggcacggtcttgtactgacgtatgcgcccacttatctttcgccttatgcgcggcgtcgagcgctaaatcgatatcttttttaccggaggaagcgacttcacatagcggctggccggtcactggcgtcaggttttgataatattcgccgtcggcgggcgcaacccagtcaccaccaataaaattgtcatagcgggcttttaacttcagtgggtacccgtattcacctggctgaatacgtgttgaagggggattgttcgtcatgaccaactccttattgtaaaggtactccacaagggtagacggtgctggtgaatttttcgccaatgatttcccgctttacgacagcaatcacgaattactttcctttacgtttctccgtctggttttagccatactaaacaggtgcctgtttaacgtacggagaacactatgcagcaatatatcggtattgatgtgggaggaactcacgtcaaatatggcgtgattaacagtgacggcgaagaattaacccatcatcaattcgatacgccagaggacgcctccacgtttacccgcaaatggcaggatgtggtggcgcgttgccaacaggactatgacattgcggcaatcggggtcagtttccctggccatattaatccccataacggtcatgcggcaaaagcgggcgcgctggcttacctggatgacgtcaacctgatggagttgttcagcgggctgaccgatctgccgctggtcgtggagaacgacgcgaactgtgcggcgctgggcgaaatgtggcgaggtgccgggcagcattatgaaaacatggtctgcattaccattggaaccggcattggcggcggtattatcgtcggacgagaactgtatcgcggcgcgcattttcacgccggtgaattcggcgtcatgccggtcgggaacaatggcgaaagtatgcataaaatcgcgtcaaccagcggattaatggcgtcgtgccgccaggcgctggcgctgcctgccgaagagatgccgcctgcggatgtgatcttcgaacgaatggcgaccgatgttcatctgcgtgaggcggtcaatgactgggcgcgttatctttcacgcggcgtttacagcgtgatctctatgtttgatccgggcgtggtgctgatcggcggaggaataagcgaacaggaaaagctctacccgctcctgacgcggcatcttgaaacgtttgaaatgtgggaggcgctccaggtgccgattcagccctgccaactgggaaatcaggcgggcaggctgggcgccgtctggctggcgcagcaaaagctcgaccgaggctaacgtgttacgccttatccggcctgcattgtctacgcaggcccggtaagcgtccgcgccaccgggcaaaggcgttacatcgccgtgcgataaagttccacaatctcatcgtgagtcgcctgaataaggcgcaaagaatacgggtgaaattatcctgataacaggttcacgctggctattttaagaagccagaaaaataaaaagcacatctggttcatttcctgatgtgctttttataaagcaacgcaataattgtattgcttcatttgttatttaatttaaccatttcattctttttgcggaaataataacgcatcacgtaataaatgatcattcccacgacgtcgtgtaaatccaatccggtcaaaatattcaaggatctgaatggccagtttccgccctacattcagcctgtcgcgaaaatccgccgcacaggttgatcctctctcttgatccagctcgcggatcatattggcgaaagcgacaatccgatcgttacgatagtaccgatcttttacgatcgcggtaatgatgccttgctgtgccgcctgccgcagcaccagccgcatcaattgttcttccgttccggtctctttcgccagatcgcgtacccaccagggttcatcgccaaatagcggttcgactttttgccagacggcctgctgctcatcgctaaatcccgctttatgatccggcagatgcaaccaaccgtgatggctatgaatcaggccgtcgtcgcgcatccgctcgatcagcatcagaaccagcgcttcatcctccatcggcagggccatgcggcgtaaacgctcgcgtcccggccccggttcatcgcggtgctgttcgtggtaggtcgccagcgtatcaagaatcttacgctgccagcgggcggcgacgggcgcgcttaacaaattgtctccagcctggataaaaccatgttgctcaataagctgacgcataccgagaggattaagctgacgcgcccaaccgaaatccggcaggttgacggcgccgcgttccagatgaatggccaacgccgcgctatcgtcctgcgcggcggcaagcgttgaaagccagtgcaaataatctggcttacgtttaccgcgacgcggcgccttaagcgtcaccacgcgtgcgccggcaagggtggcacgtgcggaaatatcacgcagcaccagtctgtcattatcggccagccacaacggcgtatcaaagatcagctcggccagcccgccttccagcaaagagacgcgaccggtcacatggctggcagcatggtgaatatgtagcggttgccattgggaaagcggcgcatgaagcgccagagaaacgatcacccgggaaaaagcctcccccaccggcgcatcggaaagcagccagtcgccgcggttaagctgctccttctccgcatcgcccgcaatattgagcgcaatacgttgcccggcatacgcatggtcagtgggctgattttgcgcgtgtagacttcgtacgcgcatcggcgtattaacgccggtcaaccatagcgtatcgcccacgtttacctctccgctcagcgccgttccggtcaccaccagtcccgcccctttcaccgtaaacgcacggtcgatagccaggcggaagcgatgctgcgcggcgtgcgaacgtgcaggaagctgctgtaaatgagcgcgaagttctgcaataccgcgtccttcattggcggcggtgacaaataaaacggtatcggcgaagccatagttgtcgagcgccgccagtacctcttcacgtacttcaccgatacgcgcctcgtccacgcgatcggctttggtcagcgcgacggtgagctggagattacccgtcagttgtaggatctgtaaatgctcgcgcgtttgcgccatgacgccgtcatcacaggcgaccaccagcaaagcgtgatcgataccgcctacgcccgccagcatgttagagaggaatttttcatgcccaggcacatcgataaagcccagcacacgaccatccggctgcggccaataggcgtagcccagatcgatagtcatcccgcgttttttctcttccggcaggcgatcggcattgaccccggtaatcgcctggagcaacgtcgttttaccgtggtctacgtgtccggcagttgcaataatcatttcagcatcatctccataaaccggctttcgtcttcaagacagcgcatatccagccataaacggccatcataaattcggccaatgaccggtacaggcagcatgcgccagcgggccgccagcgcctccagccgactaccgcgcccgtcgtgcggggtaaaggtcatggcggcgctgggaaggcggtctaccggtaatgaaccgctgccgatttgcgacaggcagggtttaacctccagcgcaaattcatcgccgtaacgtgccgccagccgcgcctgtaaccgctgcgcttgttcgcgaatcgacgcttcgctgcgggttaacagacgcagcgtgggtaatttctccgccaacgcttccgggtgcagatacagacgtaacgttgcctccagcgccgccagcgtcattttatccgcacgcagggcgcgtttcagcggatggctttgcagttgggcaatcatcgcttttttgccgacgatgatcccggcctgcggcccgcccagcaacttatcgccggagaagcttaccaggctgacgcctgcggcaatgagctgctgcggcatcggctctttgggtaagccatattgacttaaatccaccagcgaaccgctgcccagatccgccaccaccggaatatccagctctcgcccgatttccgccagttccgcttcctctaccgttttggtaaagccctcaatgctgtaattactggtatgcaccttcatcaacagcccggtattttcatttaccgcctgacggtaatctttcgcgtgcgtccggttggtggtgcctacttcatgcagcgtacagcccgcctggcgcataacatccggaatacgaaacgcgccgccgatttcgaccagctcgccacgcgaaaccaccacctctttgccgctggcggtcgctgccagcatcagcaataccgccgccgcattgttattgacgatacaggcgtcctccgccccggtgatacggcataacagcgtcgccaatgcccggtcgcgatgcccccgcccggcgccatccaaatcgtattccagcgtcaccggcgcgcgcatcgcctgcgttaccgcctcaatcgcttcttgcgcctgcaatgcgcggccaagattggtgtgcaacaccgtccccgtcaggttaatcaccgggcgcagcgcgctttgcgccgcattttccagccggagtttcgcctcttgcgcccagtctgcgtaccagtcgggaagcgtttgcgtattccggatgacgtcgcgcgcgtcgtcaagcatccgcctaagcagatcaaccacctgggtatggccataccgatcgcgcagagaaagaaaggcgctatcgtgcaataaacgatcgatagcaggaagctggctgtagagtgtacgcgtttcgcttgtcatgaaaatgcctggctgttggtggccctctcctggcgggagagggatatcgacataagggggattgtaacgtgagtttgctcaggcggacataatgcgcgtcaagcctttggcgcttcggtgcgggcaaaactttcgcgttgaaaaagcgtttcgaccagtttgaccaggtgggggcggctaacacaccagccaggcgcgacccggcggaagttgagatagcctaccgcacaggcaatcgcgatagtcgccagattgaccgtatccgtttttagcgtcccgtcgctcagataactttcgagcatatccaggctgcggttgattttttcccgctggcgcagcagttccgtttccgattgttgcgccgtcgggcgcgcctgttcgcgtacagacaccaacgctgcatccataatgccgtcagccaacgcttcaagctggcgaactttaagcgctgccatcgggtcacgcgggagcatcgctggcgcgatatccagcagttcaatatattccgcgatgatcggcgaatcgaaccagtactcccctttctccgtcaccagcgctggcaccttacccagagggttgtattgcgccacgccgttatccgcctcgtaaggtagttcattaataaattcgaaggtaatacccttttcgagcagcagaacagagattttgcgcacaaaagggctggtgtagctaccgatgagtttcatgccgtgtcctttttgccaaccagtaaaaatcatagtatggctcaaataagacgaaaagagacacaaaaggaggttgctgaatgacataacgtgagaggactcgcgacaaaatgtttgtcggatcgtattgacgttacccgggcttaaaatttcttgtgaagaggatcacaaaaattcaacaaagcaccaaaataaaaatgtgaaatatctcacataaaatggccttttaagggctaaaaattagattcgttgtttttttacacagccactttgtgatcaatatcacatcaattacctctctaccccctatatttatgtgacgcaaatcacataaattgtccctgtctggacagttgaacgattcagtgccagattgcgcagtatctacactacagggtccggctacctctgccgctacattaacaaacctcgggctttcagcctgcgcgacagcaacataagaaggggtgtttttatgtcatccgatattaagatcaaagtgcaaagctttggtcgattcctcagcaatatggtgatgcctaatatcggcgcgtttatcgcgtggggtattatcaccgcattatttattccaacagggtggttgcctaacgaaacgctggcgaaactggttggtccgatgatcacctacctgctgccgctgctcatcggttataccggcggtcgtctggttggcggcgaacgcggcggcgtagtgggcgctatcactaccatgggcgttattgtcggcgcggatatgccgatgttcctcggctcgatgatcgccggtccattaggcggctactgcattaagaaattcgacagttgggtagacggtaagatcaaatccggttttgagatgctggtgaacaacttctccgctggcattatcggtatgatcctcgccatcctggcgttcctcggtattggtccggcggttgaagtcctgtccaaaattctggcggcgggcgttaacttcatggtggcgcacgatatgctgccgctggcgtccatttttgttgaaccggcgaaaatcctgttcctcaataacgcgattaaccacggcatcttctcaccgctgggtatccagcagtcccatgaaatgggtaaatccatcttcttcctgattgaagctaacccgggtccggggatgggcgtcctgctggcgtacatgttcttcggtcgcggcagcgctaaacagtctgcgggcggcgcggccatcatccacttcctgggcggtatccacgaaatttacttcccgtacgtgctgatgaacccacgcctgattctggccgttatccttggcggtatgaccggcgtattcaccctgaccatcctgaacggcggtctggtctctccggcgtctccgggttccattctggcggtactggcgatgacgccaaaaggcgcttacttcgctaacatcgctgccatcgtggcggcaatggcggtctccttcgtggtttctgcaattctgctgaaaaccagcaaagtgaaagaagaagatgacattgaagcggccacccgtcgtatgcatgacatgaaagcggaatctaaaggcgcctctccgctggcggctggcgacgtgaccaacgacctgagccatgtgcgtaaaatcatcgtggcttgcgatgccggtatgggttccagcgcgatgggcgcaggggtactgcgtaagaaagtacaggatgcaggcctgagccagatctccgtcaccaacagcgccattaacaatctgccgccggatgtagatctggtcattactcaccgtgacctgaccgagcgcgcgatgcgtcaggtaccgcaggcgcagcatatttcgctgaccaacttcctggatagcggcctgtacaccagcctgaccgaacgtctggttgccgcacagcgccacaatactaatgaagagaaagtacgcgaccatctgaaagacagctttgaggagggtgataacaacctgttcaagctgggcgcggagaatatcttcctgggccgtaaagccgctaacaaagaagaggcgattcgctttgccggtgaacaactggtgaaaggcggctatgttgagccggaatacgtcgaagcgatgctggaccgcgaaaagctgacgccgacttacctcggtgaatccatcgcagttccgcacggcacggtggaagctaaagatcgcgtgctgaaaaccggcgtggtgttctgccagtatccggaaggcgtacgcttcggtgaagaagaagacgatattgcccgtctggtcattggtatcgccgcacgtaacaatgagcacatccaggtcatcactagcctgaccaacgcgctggatgatgaatccgtgatcgaacgtctggcgcacaccaccagcgtggatgaagtgctggaactgctggcaggtaaaaaagcttaacagttaagcatccccaaaatagttcgagctgcaggaaggcggcaacgcagtgaatccccaggagcgtacataagtacgtgactggggtgagcgaggagagccaacgcatctgcagttcgaaatatgaaggcgatatcctctcccttgtggagagggttaggttgagggaaaagcctcaccccagccctctcgggtaaaaacattaatgaaggttaatactatgaaagcattacattttggcgcaggtaatatcggtcgtggctttatcggcaaattgctggctgacgcggggatacaactgacgtttgcggatgtaaaccaggtcgtactcgatgccctgaatgcccgtcatagctatcaggttcatgttgtgggtgaaaatgagcaggtggataccgtttccggcgtcaacgctgtcagcagcatcggcgatgatgttgtcgacctgattgcccacgttgatttaatcaccactgccgtgggcccggtggtgcttgagcgtatcgctccggctatcgctaaagggctggtaaaacgtaaggcgcagggcgtggatgccccgctgaatatcatcgcctgtgaaaatatggtgcgcggcaccacgcagctgaaaggccacgtaatgaacgcgctggcggatggcgataaagcctgggttgaacagcacgtcggttttgtcgattccgccgttgaccgtattgtgccgccatctgcttctgcgaccaacgatccgctggaagtgacggtagaaacgttcagcgagtggattgtcgataaaacccagtttaaaggcgcgttgccaaacattccggggatggagttaacggataacctgatggcatttgtcgaacgtaaactcttcacgctgaacacaggtcatgctataaccgcgtacctcggcaaattagccggtcatcaaaccattcgcgacgctattctcgatgagagtattcgcgcggtggtgaaaggcgcgatggaagaaagcggcgcggtgctgatcaaacgctacggttttgatgccgacaaacatgcggcatacattcagaaaatcctcggtcgttttgaaaacccgtatctgaaagatgacgtcgaacgcgtaggtcgtcagccgctacgcaaactcagcgcgggcgaccgtctgatcaaaccgctgcttggcaccctggaatatggtctgccgcatgtaaatctggtcaaagggatcgcggcggcgatgcatttccgtagtgatgaagatccgcaggcgcaggagttggcggctctgattaccgaaaaaggcccgcaggccgcgctggcgcaaatttccgggctggatgccaatagcgatgtggtggcggaggcggttaacgcatataacgcgaccaaatgacgcagaatccggcgcaggttagcctgcgcccaaataacagattgtcagatatgcaggcaataatggaacaaacccaggcctttgaaaatcgtgtgcttgagcgtctgaatgctggcaaaaccgtacggagcttcctgattaccgccgtcgagttattgaccgaggcggtgaatattctggtgcttcaggtgtttcgcaaagacgactatgccgtgaaatacgctgtggaaccgttgctggacggcgacgggccgctgggcgatctttcggtacgtctgaaacttatctatggcctgggcgtactcagccgcaccgaatatgaagatgcggagctgttaatggcgctgcgcgaagagctgaatcacgatggcaatgagtacgcctttaccgacgatgaaatcctcgggccgtttggcgaactgcactgcgtcatggcgctaccgccgccgccgcattttgatacgtccgacgcggcgctatacgccatgcaaattcagcgctaccagcaggcggtgcgttcgacgatggtcctctctctgaccgagctgatttctaaaatcagcttaaaaaaggcctttcaaaagtaaatcccgccgttaacctctttcttcttcttttggtcggtacagccgccggtaatattccagacgctgcaaataaatgggcgcgctctccgacggcacctcggaaggaacataatcacgcggcggcgttttattcaggtattcacggaacgcctggctggacgccataaaatcgacggctttatcaataagaagtggtacgttctcacctatttttgccatgatagatcctccatgtgggacccgcgtctgactcccgcggtcgcttatttgagtttaggatcaatttagcgttgtcattgaggaaaatgtgcttaatcgcttttcttgccgacaaaagggcgcttcatcttttctttcgacaaaaaggattttattctcaacgagataattaaataatgagcagtgtaatacttgccataattgattatctttacgtcatgagttgtgaagaatcactcactgcgcgcatactataaggtatctatcccatttctatcagaagctatcccatgaaagaagttgaaaaaaacgaaattaaacgcctgagcgatcgtcttgacgctattcgccaccagcaggcaggtctctctctggttgaatccgccgataaatacgcggagctggaaaaagaaaaagagacgctagaagcagaaattatccgtctgcgcgaagtacacagccagaaactgagtaaagaagcgcagaagctgatgaacctgccgtttcgccgcgcgatcactaaaaaagagcaggccgacatgggcaagttgaagaaaagcgtgcgtggcctgattgttgtccacccgatgacggcgctgggccgggaaatggggctcaaagagatgacaggtttcgcgaagagcgagttctaaaccttccgcatcccaggctctcaggacacccgttgtacggaggatgtcttgagagcatcgggctatattccgaatttttcatggaactatttacaccgcttatatacaagttcatttttaacggtagtccctgctttttcaggatgaaaaattccactatcatgcctgtttgtatttatacaatgaatttttttcatccccttttcttatatcccgcagaatatgattgacccgcaaaattaaataacattatcatccctgaaaaaaaatccccatacataaacattataattatatttttataaagcattgctatgagcaattgataaataacgtcgggtttttgcgcgcttctatagaagcgacgaatgttttcattctaaccatacgttaatgagttattggcaatactcgctgaatgatgagctagttgtataaataacaggttaactatttatattatataaattattaacaaggatatttcatatgcacaaaaatggaaaatttatccccctgcttgcgttgggattcacattctttttatctggttgtgattacttcgcagataaacaccttgttgaagaaatgaaagaacaacaaaaagaacaagaaacaaagataaacctgttagaaaaacaacaaaaagaacaagaagcaaagataaatctgttagaaaaacaacaagctacgattatcaacacaaccaaaaaggtcaccgaagtcgttggccgcgttgaacgcaaacaacggctattcgactatacagaactggacccatcacaaacgcactattttattattaacaacggcaatatcggattagccgggcgtattctatctattgagccaatagataatggaagtgttattcatcttgatttagttaacttactcagcattccggtatcaaaccttgcgtttaatatgacatggggtacgaaaaaaccttccgaggcaaaagatctgcctcgctggaaacaactcctgctcaacacgaaaatggactcgacaatcgaactcttaccgggagcatggacaaacgtcacgctaacattaaaaggcgtatcgcccaataatcttaagtatctaaaaataggtattgacatggagaatgtcatattcgacagcatacaacctattaacgatacaaaaaagaagccaaaaaaataatagccattgatacaattattttagaaaaggaaattactcattcatgaatagaatatttaaagtcctctggaatgccgctacgggaacatttgttgtcaccagcgaaaccgcaaaaagccgcggcaaaaaaaacggccgcagaaagctggcagtttccgcactcatcggtcttagcagcattatggtttctgcggatgcactggccaacgcaggaaacgatacaggcgacggcgttactccaacgggtacccagactggaggaaaagggtggattgcaattggtaccgatgccacagccaatacttacaccaacgttgatggcgcaagcgccgcaatgggttataaagcctccgcgatggggaaatggagtaccgccattggttcctacagccagtccaccggcgactcttcgttagcgcttggcgtaaaatcggtttcagccggtgaccgggccattgcaatgggcgcctcatcctcagccagtggaagttattcaatggcaatgggcgtgtatgccaattcgagcggcgcaaaatcggttgcgttaggttataaatctgtcgcgagcggagcaacttcctctgcattaggttatcaagctactgcgagcggcgacgacagcgctgcttttggtaatggcgcaaaagcgataggcaccaactcagttgcccttggctcgggctctgtcgcccaggaagacaattccgtcgccgtgggtaacagcaccactcagcggcagataacctacgttgctaaaggcgacatcaattccaccagtaccgatgccgttacaggtgcgcaaatttattctttaagtcaatccgtcgccgaccgactcggcggaggggcttccgttaatagtgatggtacagtgaatgcgcccctctacgaggtaggcacaggcatctacaataacgtaggtagtgcattaagcgcacttaacacgtctatcactaacacagaggcctctgtcgcaggattagccgaagacgcgctgttgtgggatgaaagcatcagcgcctttagcgctagccacacgggaaacgccagcaaaatcaccaatctggcggcgggtaccctggctgcggacagcaccgatgccgttaacggctctcagttgtttgatacaaatgagaaagtggataagaacactgctgatatcgccaccaataccggcagcatcaaccaaaacactgccgatattaccgctaataccgacagcattaaccagaacacaaccgatatcgccgccaatacgaccagcatcaatcagaacaccactgatatcgccaccaacaccaccaatatcaacagtctgagcgactccgtcaccacgctcaccgatgatgcactgctttgggatgcagcctctggcgcattcagcgctaagcacaacggaagcgacagcaaaatcaccaatctggcggcgggtaccctggccgctgacagcaccgacgccgttaacggctcccagttgtttgatacaaatgagaaagtggatcagaacaccgctgatatcaccaccaataccaacagcatcaatcagaacaccactgatattgccaccaacaccaccaatatcaacaacctgagcgattccatcaccacgctcaccgatgatgccctgttgtgggatgcagcctctggcgcattcagcgctaaccacaacggaagcgccagcaagatcacaaatctggcggcgggcaccctggccgcggacagcaccgatgcggtgaacggctcccagttgtttgccaccaacgaaaatgtgtctcagaacaccgctgatatcaccaccaataccaacagcatcaatcagaacaccactgatattgccaccaacaccaccagtatcaacaacctgagcgattccatcaccacgctcaccgatgatgccctgttatgggatgcagcctctggcacattcagcgccagccgtagcggaagcgccagcaagatcaccaatctggcggcgggcaccctggccgcggacagtacagacgcggtgaacggctcccagttgtatgaaaccaaccagaaggtggatcaaaacacctctgctatcgcagatattaatacgtccatcaccaatcttagctctgacaacctgagctggaatgaaacaacgagttcgttctctgccagccacggaagtagtacgacaaacaaaatcaccaacgttgctgccggagagctgtctgaagaaagtaccgacgcggttaacggatcgcagttgttcgaaaccaatgaaaaagtggatcagaacacgaccgatatcgccgccaataccaccaacatcactcagaacagcaccgcgattgagaacctgaatacttctgtctccgacattaatacgtccattaccggcctcactgataacgctctgttatgggacgaagacaccggcgctttcagcgcaaaccacggtggaagcaccagtaaaataaccaatgtcgccgccggggcgctttctgaggacagtacagacgcggtaaacggatcacagttgtatgaaaccaaccagaaggtggatcaaaacacctctgctatcgcggatatcaatacgtccatcaccaaccttggtaccgatgcactgagctgggatgacgaagagggtgcgttcagcgccagccacggtaccagcggtaccaataagataaccaatgtagcagcaggtgaaatcgccagtgacagtactgacgccgttaatggctctcagctctatgaaactaacatgctgatttctcagtataatgaatctattagccaactagccggcgataccagcgaaacctatatcacggaaaatggtaccggcgtgaaatacatccgtacgaatgataacgggcttgaaggccaggatgcatacgcaacgggtaacggcgcaacggcagtaggttacgacgccgtcgcctctggcgctggcagtctggctcttggccaaaacagcagcagcagcattgagggcagtatcgctttgggcagtggctccacctctaaccgcgctattacaaccggtatacgagaaacgagcgcaacaagcgatggcgtggtgattggctacaatacaacagacagagagttgctgggcgcgttgtcattggggacggatggagaaagctatcgtcaaattaccaacgttgctgacggctctgaagcgcaagatgcggtaacagttcgtcagttacaaaatgccattggtgcggtcactactacaccgaccaagtactaccacgcaaactcaacggaagaagattcactggctgtcggaactgactcactggcaatgggtgcgaagaccatcgtcaatgctgatgcaggtattggtattggtctgaatacactggtgatggctgatgccatcaacgggattgctatcggttctaacgcacgcgccaatcatgcaaacagtattgcaatgggtaatggttctcagaccactcgcggcgcacagactgactacaccgcctacaacatggacacaccgcagaactctgtcggtgagttctctgtcggcagtgaagacggccaacgtcagatcactaacgtcgcggcgggttcggcagataccgatgccgttaacgttggtcaattgaaagtaacggacgcgcaggtttccaggaatacccagagcattactaacctgaatactcaggtatcgaatctggatacccgcgtcaccaatatcgaaaacggcattggcgatatcgtcactaccggtagcaccaagtacttcaagaccaacaccgatggcgcagatgcaaatgcccagggtgcggacagcgtcgcgattggctctggctctattgctgccgctgaaaacagcgtggcgttaggcacaaattccgtcgcagatgaagctaatactgtgtctgtcggctcttctactcaacaacgccgtattaccaacgttgccgcaggggtgaacaacactgacgcggttaatgtggcgcaactgaaagcctcagaagcaggctccgtgcgttatgaaaccaatgcagatggctcggttaactacagtgtgctcaacctgggagacgggagtggcggcaccactcggatcggcaatgtttctgcggcggtgaatgatacggatgcggtgaactatgcgcaattgaaacgcagcgtcgaagaagcaaacacttataccgaccaaaaaatgggtgaaatgaacagcaaaatcaaaggcgtagaaaacaagatgagcggcggtatcgcctcagcgatggcgatggccggtctgccacaagcctacgccccgggcgccaacatgacctcgattgctggcggtacgtttaatggtgaaagtgccgtcgccattggtgtctccatggtaagtgaaagcgggggctgggtgtataaattgcaaggaaccagcaacagccagggcgattactctgcggccattggcgcgggcttccagtggtaatgaagtaacaacactcccgacatcaaaggcaatggcataatgccattgccttttcacttccctttgctgtcctctcccctcaattggccctaccaattttagccagttaccacagcctactcacatttcattaaattaactctacaataccgttgccaataaataacatctggttaactatttgttgtcattatccatacacaacaatattggcaggaccacttttacacataatgtgaccccaacgagatgagcaaagattcatcccattatgcgtgtggttctcaggagacctgcaatgaacctctggcaacaaaactatgacccggcgggtaatatctggctttccagcctgatcgcatcgctcccaatcctgttcttctttttcgccctgattaaactcaagctgaaaggctatgttgccgcttcgtggacggtggttatcgcgctcgccgtcgcgctgctgttctataaaatgccggtcgatcacgcgctggcatcggtcgtgtatggcttcttctacgggctatggccgatagcctggataatcatcgccgcggtctttgtctataaaatttcggtcaagaccgggcagtttgacattattcgctcgtcaattctgtcgattacccccgaccagcgtctgcaaatgctgattgtcggcttctgcttcggcgcgttccttgaaggcgcggcaggtttcggcgcgccggtggcgataaccgccgcgctgctggtgggtctgggctttaatccgctgtatgcggcagggctgtgcctgattgtaaacaccgcgccagtcgcctttggcgcgatggggatcccgattctggttgccggacaggtcacgggcctggacagctttgaaatcggtcagatggtcggtcgtcagctaccgttcctgaccattatcgtcctgttctggattatggcgattatggacggctggcgcggcgtgaaagaaacctggcctgcggtgatggtcgctggcggctcgtttgctatcgcccagtatctcagctccaactttatcgggccggaactgccggacatcatctcttcactggtgtctctggtgtgtctgacgctgttcctcaaacgctggcagccggtacgcatcttccgcttcggcgatatgggcgcgtcgcaggtcgatcagacgctggcccgcacccgctatacgacagggcaaattgttcgcgcctggtcgccgtttctgttcctgaccgccacggtcactctctggagcgtaccgccgtttaaagcgttgtttgcccccggcggcgcgctgtatgactgggtaattaacgttccggtaccgtatctcgataaactggtcgcccgtatgccgccggtcgtacacgaagcgaccgcttacgcggcggtgtataaatttgactggttctccgccaccggcacggcgatcctgtttgccgcgctgttgtctatcgtctggctgaaaatgaaaccctcagccgcaatccagacctttggcagcacgctgaaagagctggcgttgccgatttactccatcggcatggtgctggcgttcgcgtttatctcgaactattccgggctttcttccacgctggcgttagcgctggcgcacaccggcagcgccttcacgttcttctcgccgttcctcggctggctgggggtattcctgaccggctcggatacctcatctaacgcgctgtttgcctctctacaggctaccgcggcgcagcaaatcggcgtctctgatgtgctgatggtggcggcgaataccactggaggcgtaaccgggaagatgatctcgccgcagtctatcgccatcgcctgcgcggcggtggggctggtagggaaagagtccgatctgttccgttttaccgtcaaacacagcctgatcttcacctgtatggtgggcgtgatcactacgcttcaggcctatgttttaacctggatgattccgtgattgtgatgccaaaacgcctgtcagacgagattgcctctcgcgtgcgggcgctgattgaagaacaaaacctggaagcgggcatgaaattgcccgccgagcgccagttggctctacagcttggcgtatcacgcaactctttacgcgaagcgctggcgaagctggtcagtgaaggcgtgctggtgagtcgtcgcggcggcgggacatttgtccgctggcagcacgaaacctggtctgaacagaatatcgtgcaaccgctgaaaatgctgatggcgaacgatccggactacagtttcgacattctggaagcccgccacgccattgaagccagtacggcctggcacgccgccatgcgtgccaccgctgccgacaaagagaaaatcagactctgctttgatgcgacgctcagcgaagacccggatctcgcctcccaggccgacgtgcgctttcatctggcgatcgcggaagcctcgcacaatgtggtgctgttgcaaaccatgcgcggtttcttcgacgtcctgcaatcctccgtcaaacagagtcgccagcgtatgtatctcgttccgcccgtattctcaaagctgacggaacaacaccaggcagtgatggacgccattctggacggtaacgccgagggcgcgcgtaaagcgatgatggcgcacctcagttttgtccacaccacgattaaacgatttgatgaagaccaggcccgccaggcgcgtattacccgcctgcccggcgaccataatgagatgaccagggagaataaatcatgattatttcagcagccagcgattatcgcgccgcagctcagcgcacgttgcctcctttcctcttccactacatcgacggcggcgcgtatgcggaatataccctgcgccgaaatgtggaagacctgtcgcaagtcgctctgcgccagcgcgtgctgaaaaatatgtccgatttaagcctggaaacgaccctgtttaacgaaacgttgtcgatgccggtggcattagcgccggtaggcctgtgcggcatgtacgcccgtcgcggcgaagtacaggccgccgccgccgcagacgcaaagggcattccgttcaccctttccaccgtctccgtctgtccgattgaagaagttgcaccaaccattaagcgcccgatgtggttccagctttatgtactgcgtgaccggggctttatgcgcaacgcgctggaacgtgcaaaagcggcgggctgctccacgctggtctttaccgtggatatgccaacgccgggcgcgcgctaccgtgacgcccactccgggatgagcggcccaaacgcggccatgcgccgttactggcaggcggtgatgcaccctaaatgggcgtgggatgtcggcctgaacggtcgcccgcatgatttaggcaatatttccgcctatctgggtaaaccgaccggccttgaggactatatcggctggctggcaaataacttcgatccgtccatctcctggaaagatctggagtggatacgcgaattctgggacggcccaatggtgatcaaagggatcctcgatccagaagatgcccgcgatgcggtacgtttcggcgctgacggtatcgtggtgtcgaatcacggcggccgccagctcgatggcgtgctctcttccgcccgcgccctgcccgccattgccgatgcggtgaaaggcgatatcgccattctggcggatagcgggatccgtaacgggctggatgtcgtgcgtatgattgcgttgggggccgataccgtactgctgggtcgggcctatctctacgcgctggcgacggcaggaaaagcgggtgtcgccaacctgctggacctgattgagaaagagatgaaggtcgccatgaccctgaccggcgcgaaatccattagcgaaatcagtggcgattcactggtgcaggaactggggaaaagtttgcccgccgcgctggcgccaatgagcaaaggcgatgccgcctgaacgcctggcgcgtgagagcccggtaaatttctgctattctgcccccgcatttaagggggcatcatgcttaacatcgtactcttcgaaccagaaatcccgccgaataccggcaacatcattcgtctttgcgccaataccggctttcgtctgcacatcatcgaaccgatggggtttacctgggatgataagcgcttacgccgcgcagggctggactatcacgaattcgccgcggttcagcgccatcacgattatgccgcctttgtcgccgccgaaaatccgcagcgcctgtttgcgttgacgacaaagggcacgcccgcccatagcgccgtaagctatcaggatggcgattatttgatgtttggcccggaaacgcgcggcctgcccgccagcattctcgatgcgttgcctaaagagcagaagattcgcattccgatgatgccggatagccgtagcatgaacctgtcgaatgcggtgtcggtggtggtgtatgaagcgtggcgccagttaggatatcccggcgcggtattgcggtcgtaatatattcaatgccggatggcggctaacgcctgatccggcctggccgatcccgatggcatgttcccgtttatgcggactctcgcccaatcaaatgaaagccaatatccacaatagcttctgcgcacggtttctgttcaatacgatcggccaacagcgtagcggcgcgctggccaatggcgcgtctgtcaacgcttacggtagtaattgatggtcgattgctggcggcaaaatcaaggtcgccaaaaccaataaccgctaaatcatgcgggatgcgcaaaccacggctttccgcctccatcatcgccccctgtgccagggtatcagaactgcaaacaatgacatcaaacgtcccttcgtcaaaaagctggcttaaaccgctgcgccccagcgaaagcgatgccggaagggggacatctacctgcggtacggcatgaatagcgtggcgttgaagaacactacataacccctgcttacgttgcgcggctcggcgatcggcagtccacaacaagccgggacgacgatagcccttactcagaagatactcccccgtcgcctgcccgactttttcatgggaaaaaccgaccagcatatcaagcggcgtgggcgttaagtcccaaatttccaccaccggaatagccgcgttcaggatgacctttttcagttctatcgtgtgatggatcccggtaagcaccacgccatcggggcggcgggaaagcagtgtcgccaccaactccgcttccgtttgttcggtatatcccgccacgcacagcaatatgtgatatccgcgtcgggccagttcatcgctcagcgactggatggtatcgacaaacatgttgttgttaatttgcggcacgacgacagcgattaatttactccgtcgcgacgccagaccaccggctaacgcgttgggtatgtagcctgtgacgcgaaccgcctgcatgactttctcaaccgttttggggcgaaccagttgtggcgaattcaatgcccggctgactgtcatcggagacagcccggcgctacgtgctacatcttccagcgtcggcgcacgaggtgatttggttctcttcacgtctgatgcccctgcaaagattggctgatttatccgcgcattattcatcatgcctgcggctattgccagcttcgcatcaggaaaggccgtaaatacagtagcttatcaagctcagtcattacaaaatgatagcgccatcattttgtattatgcatttccccagatatttttggatcgtgatccattttgcaataaatcctgctttttatacgacatatgtgatcaaatgttcaaatcaacatcaactttctggatcctgcgttcgcttaataataaaaatgttagcgcaatcattttgtgattatcaggagaaaaaaaatggctttaagcgcgaattccgacgccgtaacgtatgcaaaagcggcgaataccagaaccgcggcagaaaccggcgatcgtatcgaatgggtgaagctatcactggcttttctaccgctggcgacgccagtgagtgacgcgaaggtactgaccgggcgccagaaacctttgaccgaagtggcaatcatcattgccgaaatccgcagtcgcgacggctttgagggcgttggttttagctactccaaacgtgctggcggccagggtatttatgctcacgccaaagagatagccgataatctactgggcgaagatcccaatgatatcgacaaaatatacaccaagctgctgtgggccggagcctcggtggggcgtagcgggatggcggtacaggctatctcccctatcgatatcgccttatgggatatgaaggctaaacgtgccggtctgccactggcaaaactgttgggcgcgcaccgcgactccgttcagtgttacaacacctcaggggggttcttgcatacaccgctcgatcaagtgctgaaaaatgtggtgatttcccgcgaaaatggcattggcggtattaagttgaaagtcggacaacccaactgcgctgaggatattcgccgcttaaccgcagtacgtgaagcgcttggggatgagttcccgttaatggttgacgctaaccagcagtgggatcgcgaaacggctatccgcatggggcgtaaaatggaacagttcaaccttatctggattgaagaaccattagatgcttacgacatcgaaggccatgcccagcttgctgccgcgctggatacgcctatcgccaccggggaaatgctgaccagtttccgggaacacgagcagttgattctgggcaatgccagcgatttcgttcagccagatgcgccgcgtgtcggcggtatctctccgttcctgaagattatggatctggcggcgaaacacgggcgtaagctggcgccgcactttgcgatggaagtacacctgcacctttccgcagcgtatcccctggagccgtggctggaacatttcgagtggctgaacccattattcaacgagcaacttgagctgcgcgatggccgcatgtggatttccgatcgtcatggtctgggtttcacgctcagtgaacaagcgcgccgctggacacaattaacatgtgaatttggcaaacgcccttaacccgactggcgggaatccgtcccgcctctcttaccttacaggatgcattctgcccttatctgaggagtagataatgaacacaataataaagcgcacaaaagtgcgtcataccattcttatatttttatttcttgctaccgtatttaattatgcggatcgcgcaactctatccgtagttgccccaataatgagtaaagaattaggttttgatccggaagcgatgggcctggccttctcctcatttggtattgcctatgtcattatgcaactacccggcggttggctattagaccgctacggttcacgactggtttacggttgcgcattgattggctggtcgttagtaaccatgtttcagggaacgatctatctgtatggcagcccattaattgtactggttattctacgtctgctgatgggcgcgattgaagcgcctgcctttccggcgaacagtcgtttaagcgtacaatggtttcccaataatgaaagaggcttcgttacttcagtttatcaggctgcgcaatatatctcgctgggcattatcaccccgctaatgacgatcattctgcataatttaagctggcattttgtcttctattatattggcgctattggcgtgatgctcggtatattctggttaatgaaagtcaaagatccgatgcaccatccaaaagttaatcaagcggaaattgactatattcgtagcggtggtggcgagccctctctgggctgtaaaaaggagccgcagaaaataacgttcgcgcagattaaaaccgtctgtgttaaccggatgatgatcggtgtttatatcgggcaattctgcgtcacctctatcacctggttcttcctgacctggttcccgacctatctgtaccaggcgaaaggcatgtcgattctgaaagtcggttttgtggccagtattccagccattgccggttttattggcggcctgctcggcggcgtgttctccgactggctactcaaacgcggctatagccttaccgtcgcgcggaaattgcctgttatctgcggtatgttgctctcttgcgtaattgtgatcgccaactacacctcttcagaatttgtggtcattgcggcgatgagtctggccttttttgccaaagggtttggtaacctgggctggtgcgtactcagcgacacctcgccgaaggaagttctgggtattgctggcggcgtatttaacatgtgcggcaatatggcaagcatcgttacgccactggtcatcggcgtgattcttgccaatactcagtcgttcgactttgccattttatacgttggctcgatgggacttattggtctcatttcatatctgtttatcgtcggcccgctggatcgcatcacgctgacatcatccgcagcctgattgtccacattgcgaattcttcgctccgctgttccgggattgcactccatcggaacagcgttttttagttgtaccgcgcaattcagatgccgtcgccatactcaaacgtatggtgtatcccgttgaaatgctggtccatatccatcgacggcttatcgctgcccggcttgccgacaatacgcgccggaacgcctgcggcggtagtgtgcggcgggacaggctgtaaaacgacggaacctgcgccaattttcgcgccgcgccccacctcgatattgccgagaattttcgcgcccgcgccaatcatcacgccttcgcggattttaggatgacgatcgccgctcgttttcccggtaccgcccagggtgacggattgcaagatcgacacatcatcttcaataaccgccgtctcccccaccacaataccggtggcatggtcgagcataatcccgcggccaattttcgctgccgggtgaatatccacctgaaacgagaccgaaacctgattttgcaggaagatagccagcgcgcggcgacctttattccacaaccagtgaccaatgcggtaggcctgtagcgcatgaaagcctttcagatataacagcggcgtggagtatttatccaccgccggatcgcgagtgcgcacggcctgaatatcgcaggctgccgacgcgatcatttccgggtcggcggcataggcttcttcaactacttcacggatagcgatagcgggcatgatgggcgaagccagtttatttgccagcatatagctcagcgcactgcccagattttcatgcttgagtagcgtggcgtgataaaaactggccaacataggctcacagtcagctaaagcgcgggcttcagctttaatattcttccagacgatttccagttcttcacacggcatggcttactccagacgggcagaaaacgaccaacccgttctgtgcgggttgggtcgtttatgcaaacagttccttacggctagtggcgactcagctcttccttgcgggcgcgacctaataacgttaatgctgcctcgcgcgcgttttttccgcaatacaatacttgataaatttcctcggttattggcatttcaacaccaaaacggtgcgccaattcacgaacttctttcgtattgcgatagccttcgaccacctggccaatcttatcctgcgcgcctttaacgtccatgccctggccaagcatcatgccaaaacgacggttgcgcgactggttgtcggtacaggtcagcaccagatcgcctaaacccgccatccccataaaggtggcgggatcggcaccaagcgctgcgccaagccgcgacatttcggtcagtccacgcgtgattagcgccgtgcgggcgttcgcgccgaagccgatgccgtcagacatccccgcgccaatcgcaatcacatttttcaccgcgccgccaagctgcacgccgataaaatccgcattgatatagacgcgaaaactttttccgcagtgcaacagttgctggagatcgtcggcaaaggtctcatcggttgaggccagcgagattgccgtcggcaaacccgccgccagctctttagcgaacgtcggaccggaaatcaccgccagcgggatttgatcgcctaacgcctcgcgagcgacatcctgcaacaggcgccccgtttccgcttccaggcctttggtcgcccataccagacgcgcatccggacgcatcagcggtttaatctgccgcagcacgtcgctgaaaacatggcttggcaccaccaccagaatgttacgactggccgccagcgcggttgctaagtcgctttccaggtgtaacgtatcgggaaaaggcacatcgggaaggaacgcgacgttgcagcgatcgtgctccagggtcgcgatatgttttgggtcgtggccccacaggacaacctggtggccgtttctcgccagagtgatggcaagagcggtgccgtacgagccggcaccgatgactgtcattgacgcattactttggttcatcaggcatcctgatgttcttcagtaccttcgccagcctgctgctgcaaatagttcatgaacagcgcatcaaagttgaccggcgcaaggttcagttgcgggaacgtaccgcgtgaaaccaggctggtgatgcactcgcgagcatacgggaacagaatgttcgggcagtatgcgcccaggcaatgcgccatctgagtaccttcaataccgctgatggagaaaataccggcctgctgaacttcgcacaggaacgcggtttcttcccccagggaagccgttacggtaacacgcagcacaacttcataaacgtcatccgccagttgggaagatgccgtatcaagatccagtttaacctctggctgccaatctttctggaaaacatgcggtgcgtttggcgcttcgaaagaaacatccttggtatagatacgttggatctggaaagccatttcagtgttattttgttctgacatgtgtaaaaccctttagtgttgtccttaaatacttgagtacgccttaacgcaacagcggatccagtccaccacgcgcatccagcgcatacaagtcgtcacaaccgccaatgtgctgtgcatcaataaaaatttgcggaaccgtcgttcggccactacgtttgatcatctcttcacgcttcacggcgtcgccgtcaatcgcaatttcctggaaactcacgcccttgctgtttaacagcgcctttgcacgatggcaaaacgggcaggttgctttggtgtagatttcaatattggccatgacttcgctcctgtttttttacccgatggatttcatgtcgacgcaagggcaagtcattccccttgcgtcatgaaaacgacgggtaatcacttaccgcgcaccagaggcagattctcgccgctccagcctgctacgccttctttcaacacaaagaccttttcaaagccggcttttgtcagcgcgttagcggattcctggcactgcataccagaaccgtcgaccacgataatcggcttgtctttgtgcttttccagttcgccaacattgttggctttgatttcgctcggcagcaaattggtcgcgccagcgatatggcctttacggaaatcgtcacgttgacgtaaatccacaacaacggcgtcctctttgttgataaggcgcgtggcttcgccgcgtgtaatcaccttaacttttgaagtcagacctttgaacgtggtaaataaaaccgccaccagtaacgcaatccaggcgatactcagtatgggatgacggccaacaaattgcataatttcttgcatggggggtaacaactcccgacgtagtgattaaaaaaccaggaaaggagtatacctgtgcagtggcgcaaatacagccagagcgtgcactggaatgcatttttgcggggcgctacgaaaaaaaatcacgctattacttgccttctcacgccagcgcgatccctttctttgatcttctgaggctattttatcgattcagctgtagtaaaattacgcaattattttgtctattgagtatgaggttgtcgcaatgtcggtttctaaaaaacctatggtactggtgattctggatggctacggctaccgtgaagaacagcaggataacgctatcttaaacgccaaaaccccggtgatggatgctctgtgggcaaaacgtccgcataccctgatcgacgcatccggtctggaagtgggtctgcctgaccgccagatgggcaactccgaagtgggccacgttaacctgggcgcaggccgcatcgtttatcaggacctgacgcgtctggacgttgaaattaaagaacgtactttctttgctaacccagtcctgaccaatgcggtagaccaggcgaaaaacgccggtaaagcggttcatattatgggtctgctgtccgcgggcggcgtccacagccacgaagatcacattatggcgatggtggagctggccgcagagcgcggcgcagaaaaaatctatctgcacgccttcctcgacggtcgcgacacgccgccgcgcagcgctgaagcctcgctgaaaaaattcgaagacaaattcgccgcgctgggcaaaggccgcgtggcgtctatcgtcggtcgttactacgctatggaccgcgacaaccgttgggatcgcgtggaaaaagcgtatgatctgatgaccctggcgcagggcgaattccaggcagataccgctgtggctggcctgcaggccgcttacgctcgtgatgaaaacgatgagtttgtcaaagcgaccgttatccgcgccgagggccaggctgatgcggcgatggaagacggcgacacgctgattttcatgaacttccgcgctgaccgcgcgcgcgaaattacccgcgctttcgttaatgctgatttcgacggctttgcgcgtaagaaagtggttaatctgaacttcgtgatgctgaccgaatacgccgccgacatcaaaactgccgttgcctacccaccagcgtcgctggcgaatacctttggcgaatggatggcgaaaaacgacaaaactcagctgcgtatttccgaaacggaaaaatatgcgcacgtaacctttttctttaacggcggcgtagaagaaccgtttgctggtgaagagcgcattctgatcaactccccgaaagtggccacttatgacctgcaaccggaaatgagctctgcagaattgactgaaaaattggtcgcggcgatcgaaagcggtaagtacgacaccatcatttgtaactatccaaacggcgatatggtcggtcataccggcgtgatggaagccgccatcaaagcggtggaagcgctggataactgcattgaacaggtaacaaaagcggttgagtccgttggtggacaactgttgattaccgcggaccacggcaacgcggagcagatgcgcgatccggcgaccggtcaggcgcataccgcccacaccaacctgccggtgccgctgatttatgtcggcgagaaaaacgtgaaggcggtcgaaggcggcaaactttcagacattgcgcctaccatgctgtcgctgatggggatggaaatcccgcaagagatgactggtaagccgctgttcatcgtggaataatccctccccatgaggggaaaggcgattaacaccattcaacaggccgtgaaaccaagaacgttttcagtcaggcctttgttctacgccagcgtacttagcgctggcgtattgttgtgcgccttttccgcccacgcggatgaccgtgatcaactcaaatctattcaggccgatatcgccgcgaaagaacgcgacgtacgccagcagcagcaacaacgcgccagcctcctggcacaacttaaagcccaggaagaggccatctcagccgcagcacgtaagctgcgcgaaacgcaaagcaccctggatcagttaaacgcgcaaattgatgagatgaacgcctcaattgccaaactggagcagcaaaaagccagccaggagcgtaatcttgccgcgcagttggacgccgctttccgccagggcgaacacaccggcattcagcttattcttagcggagaagaaagccagcgtgggcaacgcctgcaggcctacttcggctatctgaaccaggcgcgccaggagactatcgccgagctgaaacagactcgcgaacaggtcgccacgcaaaaagccgagctggaagagaagcaaagccaacaacaaacgttgctgtatgagcagcgcgcccagcaggcgaagctggaacaggcgcgtaatgaacgtaagaaaacgcttgccggactggagtcgtctattcagcaaggccagcaacagttaagcgaactacgcgccaacgaatcacgcctacgcaacagtatcgcgcgggcggaagcggcggccaaagcgcgagcggagcgtgaagcccgcgaagcgcaggcggtacgcgataagcagcaggaagcctcgcgtaaaggcagcacctataagccgacggaaagcgagcgctcgctaatgtcccgcaccggcggtctgggcgcgcctcgcggtcaggcatactggccggtacgcggcccgatcttgcatcgctatggcgaacggctgcagggtgagctacgttggaaggggatggtgatcggcgcgtcggaaggcaccgaggtcaaagccatcgccgacggcagggtgattctggcggactggctacaaggctatggcctggtggtggtcgtagagcatggtaaaggcgatatgagcctttacggctataaccagagcgcgctggtcagcgtaggcgcgcaggtgcgcgccggacaacctatcgcccttgtgggcagtagcggcggtcagggcagaccctcgctttatttcgaaattcgtcgccagggtcaggccgtcaatccacagccgtggttgggaagataagttttgcctcagtttcgtcgctccattctcacgctggccactttgctggcgtttgcacatcccgttttcgctggcaagctcgccatcgtgattgatgattttggctatcgcccgcacacggaaaaccaggttctggcgctgccgccaaacatctccgtcgctgtactgcccaacgcgccgcacgcgcgcgaaatggcaactaaagcgcacaatagcgggcatgaggtgttaatccatctgccgatggcgccgctaagcaaacagccgctggagaaggatacgctgcgaccagatatgagcagcgatgagatcgagcgcattatccgcgaggcggtaaacaacgtgccgtatgccgtcgggcttaataaccacatgggcagcgcaatgacttccagcctgttcggtatgcaaaaagttatgcaggcgctggaacattacaatctctattttctcgacagcatgacgattggcaatagccaggcgatgcgcgcggcatccggtacgggtgtgaaagtgatcaagcgcaaagtgttcctcgacgatacgcaaaacgaggcggatatccgtcgtcagtttaatcgcgctatcgaactggcccgtcgcaacggttccgctatcgcgattggtcatccacatcccgcaacggttcgcgtgctgcaacagatggtttatcgcctgccggcggatatcaccctggtacgtccaggcagcctgctcaacgaaccgcaggtagatacgtcccgacctggtgtgacgccgcagaaaattgacgcgccgcgcaatcccttccgcggcgtaaagatgtgcaagccgaaaaaaccgctgcaaccggtctacgctacgcgctttttcagcgtcatcggcgagagcattacgcaaagttccgtggttacctggtttcagcaccagtggcaaggctgggggaaaatcgccgcgcctaaaaacgtgagcgctaagacagattgagcgccttacgggccatacgacggtgcgacaaggttttgtcgcgccattgccacagccggaaggaccagagcagcgtctgataagctgctttcgcgctgcggacgttagccatcatccgtctatacatgccagaagtaaaaatttcggcaatcatacgctggcgggtcaaaatatcaggctctttacgtaccgcatgacaaacgcgtaacgcttcccaggtaatttgctggcgaaattccgggtaaatcggaatacgacgggcataatcacgattgagcttttctaataatcgcgtaattttaatataatgccgctgataattaagatttttattgccttgtctttgcaaacggcttaccgaattatcatgcaggaaatatttatataatgattgttcggtataacgtacgcgcgtggcattaaacataacttccgtcgaccataatatgtcctgatgatgtagtccgggaacgaaagtaatattgttatcggtaattaacgcacgtcgataaacgcccatccagacaacatgcgtccagcgccgcgaggccaacgccatacgcaaccaatccggtccgcttaataccccggtggaacgcagacgatcggtcggaatagattgccaggcgtgcccggtttttcggacgcaccagtccgcattacactgcgcaacgtccagatcatcgttaagcgccatagtcatcagcgtttcatacatcttcgggtagacctggtcatccgcatcgacaaaggcgacataatcgccggtcgccgcttgcaggccaagattacgggcgacagatgcgccagcattggcctgatgaagcagtcgaacatgtgggtaatgttccgcgtaatgttttgctatctcaacggaatgatccgtcgatccatcattcacaataataatttccagcgccgaccacgtttgcgcgattaacgacgccatgcaagcattaaaatccgctcccgcattatataacgggacaatgatactcactttggttttactatttttcataacgattaccagaaaaaccttaatttaccctgcctttatactgtggctctattaagaaactattaagccgccataattaatttttacagtaaaaagcaagcacaaaactcagagtagagcgtgacgttagcgagtaaaataagagtaaagcgcaattacgaatgcttgatgtctatgacaattctttacggctttccagattttccctaacaaaaaaggttggcgaatgacaccaaccttttacgatgaaacgtatatcagacccgataaaattatcgggtctctatacccttcatacttcaagttgcttatgtgttggctacggattactcggcccatccatgggcctcgccctgacgggccgtcgcaagcgacgttcaaatctgctcccggcagatttgtcgttcaccccagtcatatagttatctatgctcctggggactcactcccttgccgcctttaagcaactcgaattattttgggtatatacatattaatcccagctcagaataacttttcctgactggcctgaacgcatggcatcaaaacctttctggaaatcatcaatagagaaacgatgggtgataatcggtgacagatccagaccggactggatcagcgccgccattttgtaccacgtttcgaacatctcacgaccataaatacctttaatgaacaagcccttaaagataacttttgtccagtcgatagacatatctgatggcggaatccccagcatcgcaatacgaccgccgtgattcatggtgtccagcatggtacgaaacgccggcggcgcgccggacatctccagacccacatcgaacccttcggtcattcccagctccgccataacgtcgttcaggctctctttcgcgacgttgaccgcgcgggtgacgcccattttacgcgccagctccagacggtattcattgacgtcagtaatcaccacatgacgcgcgccgacatgtttcgccaccgcggcggccattacgccgattggccccgcccccgataccagtacatcttcgccgaccagatcgaaagacagcgccgtatgcaccgcattaccaaacgggtcgaaaatagaggctaaatcatcagaaatgttatccgggattttaaacgcattgaacgccgggatgaccaggtattccgcaaagcagccgggacggttgacgcccacgccggtggtgttgcgacacaggtgagtgcgaccgccgcggcagttgcggcaatgaccgcaggtgatgtgaccttcgccggagacgcgatcgccgattttaaagcctttcacttcctgaccgatgccgaccacttcgccgacatattcatgccccacgaccatcggaaccgggatggttttttgcgaccagtcatcccagttatagatgtgaacgtcagtaccgcagatggctgttttacggattttaatcagcaaatcgttatggccgacttccggttccggaacgtcggtcatccagatgccctcttccgctttcagtttggataacgctttcatcttacatcctcaggcaatcacgcccagttgtttaccaatacgcgtgaacgcgtctaccgcacgcgtaatttgctcaggcgtatgcgccgcagacatctgggtacgaatacgcgcctgaccttttggtacgaccggatagaagaaaccggtaacgtaaatgccctctttttgcagttcgcgggcaaatttctgcgcgacaaccgcatctcccagcattaccgggatgatggcgtgatccgcgcctgccagcgtaaatcccgcggcagacatctgctcacggaactgccgggcgttcgcccacaagcgatcgcgcagttctgcgcccgcttccaccatctccaacactttaatagaagccgccacgattgccggcgccagggagttggagaacagatatgggcgggaacgctgacgcaaccactcaacgacctctttacgcgccgcggtataaccgccggatgcgccgcctaacgctttgcccagcgtaccggtaataatatctacgcggcccattacgtcgcagtattcatgggaaccgcgaccgttttcgccgacaaagcctaccgcgtgagaatcatcaaccatcaccagcgcatcgtatttatcggccagatcacagacgcctttcagattggcgatgacgccatccattgagaacaccccatcggtggcgatcaggacatgacgcgcgccggcctcacgcgcctctttcagccgcgcttccagctctgccatatcgttgttggcatagcgatagcgcttcgctttacacaaacgcacgccgtcaatgatagacgcgtggttcagcgcgtcggaaataatagcgtcttccgcgcccagcaacgtctcaaacaagccgccgttagcgtcgaaacaggaggaatacagaatcgcatcttccatgccgaggaagcttgccagcttttgttccagcgctttgtggctgtcctgggtgccgcagataaaacgcacggacgccataccgaaaccgtggctgtccatgcccgcttttgcggcattaatcagctcagggtgattagccagcccgagatagttattggcgcaaaagttaataacgtggcttccatccgccacggtgatatccgcctgctgcgcagacgtaataatgcgctcttctttaaacaatccttccgcccgggcggtttccagatcgttggttaactgtttgtaaaaatccccacgcattgcgattctccagactgggcaaatttcagcacatattacccaaagcgatacgttgatacgagatgacgcgtcatcacttctttaaaatgcagcataaatcacgcgtatcctcacgggttatcagtgaatggatgaatagtgttatgataagagcattcatgtctgagacagtctctgacaccataattcaaaggttacagttatgatcatcgttaccggcggcgcgggctttatcggcagcaatatcgttaaggccctgaatgataaaggtatcaccgatattctggtggtggataacctgaaagacggcaccaagtttgtaaacctggtggatctgaacattgctgactatatggataaggaagatttcctgatccagattatgtccggagaagagctcggcgatatcgaagctattttccatgaaggcgcctgctcttccaccaccgagtgggacggcaagtatatgatggataataactatcaatactccaaagagctgctgcactattgtcttgagcgcgaaatcccgttcctctacgcctcttctgccgccacctatggcggtcgcacgtctgatttcatcgaatcgcgcgaatacgaaaaaccgcttaacgtttatggctattctaaattcctgtttgatgaatatgtgcgccagatcctgccagaagcgaactcgcagattgtcggtttccgctatttcaacgtctatggaccacgtgaaggccataaaggcagcatggcaagcgtggcatttcatctgaatacacagttaaacaacggcgaaagcccgaaactgtttgaaggcagcgaaaacttcaagcgcgacttcgtttacgtgggcgatgtggccgccgttaacctgtggttcctggaaagcggcaagtccggcatctttaacctgggcacaggccgtgcggaatctttccaggccgtcgccgacgcgacgctggcataccataaaaaaggtagcattgaatacattccgttcccggataagctgaaaggtcgctatcaggcgtttacgcaggcggatttaaccaatctgcgcaacgcgggctacgacaaaccctttaagaccgtcgccgaaggcgtcacggagtatatggcctggctgaaccgcgacgcgtaagtatgaaaattttggtcattggcccgtcctgggtgggcgacatgatgatgtcgcaaagtctctatcgcacgcttaaagcacgctatccccaggcgataatcgacgtgatggcgccagcctggtgtcgtccgttattatcgcgtatgccggaagttaacgaggcgatacccatgccgttgggccacggcgcgctggaaatcggcgagcgccgcagattgggccatagcctgcgagagaagcgctacgatcgcgcctgggtgttgccaaattcgtttaaatcggcgctgattcctttctttgccaatatcccgcaccgtaccggctggcgcggcgaaatgcgctatggcctgctgaacgatgcgcgcgtccttgataaagacgcctggccactgatggtggagcgctacgtggcgctggcttatgacaagggcgtgatgcgcgcggcgaaagatctgccccagccgctactctggccacagctccaagttagcgagggtgaaaagtcgctgatgtgcagcgacttttcactatcttctgaacgtcctctgatcggcttttgccccggcgcagaatttggcccggcaaaacgttggccgcactatcactacgccgaactggcaaagcagctcattaacgaagggtatcaggtcgtgctgtttggctcggcaaaagaccatgaagccggaaatgagatcctggcggcgctgaatagcgagcagcaggcatggtgtcgcaacctggcgggggaaacccagctggaacaggccgtcattctgatagccgcctgtaaagccatcgtcactaacgattccgggctgatgcacgtcgcggcggcgctcgaccgccctctggtcgccttgtatggcccaagtagcccggatttcacgccgccgctgtctcataaggcccgggtgattcgtctcattacgggttatcacaaagtgcgtaaaggtgatacggcgcaaggctatcaccagagcctgatcgatatcacgccgcagcgggttctggaagagcttcattcgctgttgtcggaagagggcgtttaatgcgggttttgatcgttaaaacatcatcgatgggcgacgtattacataccctgcctgcgcttaccgacgcgcaacaggcgattccggggattcaatttgattgggctgtcgaagaagggtttgcacaaattccgtcctggcacagtgctgtcgatcgcgtgattcccgtcgctattcgccgttggcgcaaggcctggttttccgcgcccatcaaagcggaacgcacagcctttcgtcgggcggtatgcgcaaaccaatacgacgctgtgattgatgcgcaggggctggtaaaaagcgcggcgctggtgacgcgtctggcgcatgggataaagcacggtatggactggagtaccgcccgcgaaccgctggccagcctgttctataaccgtaaacaccatatcgcaaagcaacaacatgcggttgaacggacgcgcgagctgttcgccaaaagcctgggatacgataaaccgcagtcgcagggcgattatgccatcgcaaaacattttctgcattgccagcaggcggttagcgatccgtatgcggtgtttttacatgccacgacccgcgatgataaacactggccggaagcaaactggcgcgagcttatcggcctggtgggcaacaccggattacggataaagcttccctggggcgcgcctcatgaggaggcccgggctaaacgactggccgaaggctttgactatgtggatgtgttaccgcgcatgagcctggaggaggtcgccagagtgctggctggcgcaaaatttgtcgtatcggttgataccggcctgagccatctcaccgccgcgctcgacagaccgaatattacgctatatggcccaaaggaccctgggttaattggaggttatgggaagaaccaaatggcatgctgctcaccagaacagaacctggcgaatttagatgccacaagcgtatttggaaagattcattaaagagactctgtctcatcccaaacctattgtggagaaaagatgctaaccacatcattaacgttaaataaagagaaatggaagccgatctggaataaagcgctggtttttctttttgttgccacgtattttctggatggtattacgcgttataaacatttgataatcatacttatggttatcaccgcgatttatcaggtctcacgctcaccgaaaagtttcccccctcttttcaaaaatagcgtattttatagcgtagcagtattatcattaatccttgtttattccatactcatatcgccagatatgaaagaaagtttcaaggaatttgaaaatacggtactggagggcttcttattatatactttattaattcccgtactattaaaagatgaaacaaaagaaacggttgcgaaaatagtacttttctcctttttaacaagtttaggacttcgctgccttgcagagagtattctgtatatcgaggactataataaagggattatgccattcataagctatgcgcatcgacatatgtccgattccatggttttcttatttccagcattattgaatatttggctgtttagaaaaaatgcaattaagttggtttttttggtgcttagcgccatctaccttttctttatcctgggaaccctatcgcgaggggcatggttggcggtgcttatagtaggtgttctgtgggcaatactgaaccgccaatggaagttaataggagttggtgccattttattagccattatcggcgctttggttatcactcaacataataacaaaccagacccagaacatttactgtataaattacagcagacagatagctcatatcgttatactaacggaacccagggcaccgcgtggatactgattcaggaaaacccgatcaagggctacggctatggtaatgatgtgtatgatggtgtttataataaacgcgttgtcgattatccaacgtggacctttaaagaatctatcggtccgcataataccattctgtacatctggtttagtgcaggcatattgggtctggcgagcctggtctatttatatggcgctatcatcagggaaacagccagctctaccctcaggaaagtagagataagcccctacaatgctcatctcttgctatttttatctttcgtcggtttttatatcgttcgtggcaattttgaacaggtcgatattgctcaaattggtatcattaccggttttctgctggcgctaagaaatagataaaaaaacgcgctgatacttattacggtatcagcgcgttttccatcatcaggactcaatcacttatcaaaccagtttttcatttgttcctcgaaacgctgcgctacattttcccaactgtattttgaaaacaccagggattttgctttttcggcaatctggtggcgttccttatcagcaagcgcacggttaatatcattaattatactgtcgctcgacataggttctgcgaggtgatagcccgttatgccatctaacacaaattcgctaatccccccttttttgctggcaagaaccgcttttcctgctgccatcgcttctacagccaccatgcaaaatgcttcttcaacctgagatggcacaataaccagatcggctatatgatagaagttatgcatctggtcaggagattgccccccagccataatacaatccgttccaatctcttttgcggcgtccagtactttcttttgatactctgctttttcacccttgcggcttgcataagggtcgccaacaacgacaagtttaatattacttcttaaggtacgtaattgtttgaacgcctgcaaaagcaacaggatgcctttatcaggcgaaattctcccggcatacaagagaacggtggcatcttccgcaatatttaattgctgacgaagattatcttgtgggtttcttttataagtctcagcacaaaaaccattaggcacaatactaacagcagcggcgggcaatctttcttcataaaacgctttaagaaactgactgggcacgataatttttgcatcattatcaggaagttctggttcaaatgcattatgcatgtgcataaccagttttgcattcggattgcgctctctgatctgccgatacagtttcatactattatgaataacaatgacgctatcttcctgggtagtcactttatctctaatattaaggatgcgctgggaatagggtagtgggtcgagacgagtccatttctgaaaaagacgcttataaactttactaaacccgatgtaatgaatatcacagttatcgtttattttattatattcaggatagccagcattctttatacaagcaatagcattcggtattgatagtcgttttgcaacctggtaaatccaggtttctaccgcagccgcaccacgaggaggaattgaaaatataggagtaacagtaaatatgatttttttaatcataatagctataatccagaatagttaactttatagaaaaagaaatgttataaaaaaaagaaatgcgtgccgaagcaacgaaaaataatgatttatctagtgtctagacaattttatcgtaatatatttcatcctcaagctccgaggctgtaatatatggaataatatcgtaatgaattgcagtatcatctgataaattaaagatatttaaatcactcacattttttctcataaaagtaaaaaatggcagtattttaaacagatctttactaagctcagatggcatagggctggtagattcgtcatagaaacgtgggcaactccctgttaagtcaagcccagaacatataatacggccatacttgagggaataggcaacctgaatagcggtataagcaatagtatggcaagagcaatacccgatgctgatatccttgcaaaatccagccagtcgccctcttttcgaaagaggaactgaaataagtaatgctttatgaacccgcttgaggatattaaatttaattttctttaaaaagccccctttttctcggcgataaaaggagcgaataattaaacagttttcttcaatatatttttgatcatccactgaagcctgttcgtacacatcaagattgacgatagtaaactgactgttacggctaaagttataaaaatcttcgcgccgacgatggaggaagcgaatatccgtcagaaggtacaaaaatggcttgacgttattgtttagcaaatattgaacagaaccattgactgcaatgacatctttcattcgtaacaaggacagcggcgtctttctggacgtaggaccagaaagaaaaataatacaatcttcagccgttcttttcgcaataagttgcagaacatcggcgtgagttatgaagttaacgctgcccataaaaaactcgtatgtttatcatgcaacctataaataaatgttatattcaataactaatattacatctcaaattctctcaagtatgtcataacgctgcagcaaataaaagtcagtcagccccttaaattaaaccaaacgtgctacattgatcagcgtttttccttacccttaatacgacgcaagaaatttcggagttttttcttataaatcaataagtaaaatccgatatctctcacattatttttgataccataatgtctttctaaatcaatacgatcctttgcttttcgttgtctggaaggtctttttccggacaaatcgataattctgatctcattgccttgcaggataaagttacctttatggggatcgcccgaaaccataccatgctgatgcagagaatatatcgactgtttgattttccctctcacctcgtcagaaatttctggcatatcaacaagttcaataccttcaatatactcaattatcatcacgtatgtttttacatagcgtaatgttttaatttccgccagcaggtaaaaatcattaagcgccgcaaacccttcacgccgcacacgatctgtctgatgaaaaagcttttcgtagtaatctccttttactaacgatttgaaaaagcgttcagtattttttacttttggactaaatactttgagaatatattttccgtagtctgtattaatcaatacaacttttgtatcttctatattacggaagactttaataacctgatgattataagatagaaaatctttgaatatctcaatgtatttttcaccgtcttttttgacaaagacggtatagtttttaatctttttttcaataatcataatggagatttagggaggggaattatttgtggaaaagtttacgataaagatatgcgcttccagccagaaggcctttaaaataatgaccttgcacgagaagatgtttatatcgcttcttaaattcgactatggtacgcgcatcttttgcgggaaaatctttccagggcgagttcagtcgtgcatttttataatagataactgaaggataatttgcccaggcatgccatggttttgtagcgcccgtataatgaattaaaatagtattatcattaattatattgctatattttttatgtgacttatctttcaactcacttttaatagtataaatagtattatacggtcgcggtagaaaaatgactttatcctgtaggagaatattcaaaacatcctgatcgggatatttaaaagagtcagcctctttacctgccaaaagtaaaaatgcctttttggttaaggcattctctttccataatttcaggttaacaaaaaccacgccggagttaaaataaccaccttgtaaattaaaagcgcttaatctctcatttaccttattctggatggaatcaacatcttttacgaccgcagcgatcttctctgtcagatcaagctgtaaaagatcttgcaaagatcctttgcatacaacatcggcatccaaataaagtaaggtatttaccttcttgctgagataatcgaaagcaaataaacgaaaatacattgctctcgaccatactttagtttgaggcaatacctcaaggctttctactttaataagataaagagaaatttttatgtgatgctgtacggctaaacgctctatatattttacaaaacacggggagtatgagtcacaaataatgtgaaaagcgagcgggatattattgtttaatacaactgaagcgattgatacccccacaccatcaagatagttttcatcaacgccataagaaatgtttaatacgttatcatcattattattactttcatcaaaaactttatattcagctatttctatctcaggaaatgaatccattacatcacctatgggttttattcaagaagtttacgtttaaagtaggctatataataatttatacccgaagtataatgcttctgattaaacatatgctttgccgcataacgtaactgatggctagtcactggatttaaaagtgcacaatgagaccatggtgagttgctcttagcctgtaaaaaatattgtgacacggggtaagccccccaactatgccagggcttcgttggtccgatataatgaacaaatacagtctcagcatcaactggattaataactgaatcttttaattcatagttaagactaaattgtgtattaaattttttatcaacaaaacgcgctttattcactaaaaatatatttaatacatcctgatcaaggtgcgttatgcgctgtactacctctggatcttttagcatttcaatcgctttcttagagatattttctgcagtccaaagaggtatgttaattaaaataaaaccggcattaaaatagccagaaaccagcccaggcgttgccaggctaaccgagcgcttagtccaccattccaactcgccttcagcaacgacagccgcaatctcattttcagcaaaattaagatcaataagttcctgaatactccccttacatgcaatatctgcatccagataaagtactctatctgttttatctgaaaaataatcggcgataatgaatctaaagtatgttgcataggtccagtttttggtactgggtagcgattttaagcgctcacagtcgattaggtaaacaacaatctgcgtagcgtactgttttgctaatgcctcaaatcgctgctggtcttcagagtcaaagaaatcggtaaaaacatggaaagctaacgccttctctggattagcgaggagaaccgatgcaatagagacaccacagccaaaaagaaagtttttatcaatcccataagctatattaaatttatcagcatcactatgttgtgcatagttataatctaaagtctgttgaatgacttcttcttcaaaatattttctgctcatagtgatcacttttgtaatttcgagaatattgcattattaaaatttttaaaatatagcacatcgtaaaatctctcaatcgtgccgggaataatatcatgctgatattttacttcaccagaaataacgcgattaaggtgtcctacaaaatcatctatagcacccggagtgtaaagctcaccattcaaaccgggtttaatcatatcgcgcggaccagacatacaatcagaactaatacacggaattccatatgacattgcttccagcagggtcataggaaatccctcaaatgcagaggtaagtagtaacgcggtgacattttttattttttgctgtacgacttgccacggcgcgctttgccaaccataccagatcacacgctgctcaataccaagctcccgactataggcctggcacttttcaaaatctgagccatcaccaataatatgtagctgccattcccctgtcgtacgagctaagccatcaaataaatctttaactcttttctgcccttcaaatttaagacgccctacatagagaaatacagcgggtttatcgcgctcaggcggcggcacaatgactgttttaatagagacaggattataaacgacgctaatatcttgcgctgagataccccgtgccatgatctgttctttaataccactactgatggccagatgataatccgcgtacgttatacattctgcatgttttttatggtcgagcgaaaaatgcggccacgagaaaatagtaaaatgtttaccacttttctttcgtgctttattggcataaagacatgagatgacatcaatacatatcacaatatccggtgacgtttctttcagccactgactaaaattataaacatgcttagctcgacgaagaaaacttaattttatatttgagaatgattgcgcatatttaatctcttttagccatgctttatccattttgtcattacgacaaaagaaaaacatttcacagttgatcttcggagagctattttcaaacgtatggataacgttgctaataacggtttccatccctccaaaaccggataccgcttcgccaataaaagctattttcatatataccccagagttaaaaccttaatctaaagactttagatattaaatagcaaaaatagtaatataaccctatagagtaatttttacctgacatctctctttttgctttaaggcgtagtcaatatctttattattttcgataatggaatatattgccacacctgctggcattataaaaccatgatcaaagcaaagagcaatgtccagtcttcttccaaaaaaatcatcatgttgaattatgtttttttggtttgaaatataacttttaatgttagacattctgtctatccttgtctcactcataaattactcactgagtgcataattattataattacagattttttcttattgtcctttctttaattcgagcggctttaacatctgcctgatgaatcaaccccgattctttttgcaaaatctctcgcagggggagagagaaatactcacgcataaaccggaatatatctcgctgagtcaggccaatattcattgaagaaaaataaagcccaattaaatctttgtcacgccagcgaaggggaacgtgctggcgtatctgcgcgcgatgcaggtcaattacggagatttttaaatcctcttcgcgaccagtgaaaggtaaatgcagaagaaagtggcaaatataacagtcgcgatggttaattcccccggcgtgcattttacgtaccatagtcgcaacacgcttaatgatcatccacttcacctgcgcgtccggtggattaacagcccagtcagcacagtagtcttcaaggctaatggtgggcgttaaatcttcggtgataataaatgatgttctggttagcgggtttacgcctttttcaccaaaaccaacgccgtgcatcgtatcaacgcccagctcatgtagacgatgaatggcgtgccattctctgtcagcgcccagaacaggcatacgtaacgaaatcaggttcttcacaatttctttcagcgaagtacctttatgccacttcaggaagtagcttttaccgtccagctcaaaccgcaatgttcgacgcgtctccagctctctgaacacttcgccctgtaacgtttttacttcctcaaaagcatctttaccgcgccatagtgtggttaacggcgctttcagctcaaccatctaaatcacctgtaataatatccgcggccttctccggtaagctgtataaatcctgggtatcagcataataccgcgcattttcagcccaggcgttgcgtaaggaaggctgtgtcagcgctttgagtaaaacctcatttagcgcatcctggcggaatggttcagtcatcgcttcgccacagtttgcatccacaatataatgtgcataaccgcacaccgcggttgtcagcaccggcaaaccagcagtaatggcttccagcaaaacaataccagcagcttcctgataggctggatgcagtaaaaggtcggctgccgccattaactccgcgatatcattacgtccggagaaaaaatgcacattcgtgccgacgccgcttctttcagccagtgctgcaaacttcttcggcttatcctgcccgacaacatagagcaccgtattttgccgtaaagattcgggtagcgatgccagcgcttcaatagagcgatccacacctttacgggtaaagtcagaccctacttgcaacagtaatttttgctgttctgagataccatttttctgacgataaatttgacgactgtttgggatctgttggctatattttctgtccgggtaaatccccggaggaagaatatggaaacgctccgcttcagtctgataatgtttttggaagtcagcaatctgcttattcgtcagcattaatagttgcgtcggcttgccgtgttcaaacgtggcgcgttcaaaagcagcataatgccgatagcgtgatgtcaggcgatagaaaaatcctttttcctgtgcgactttttcggcgtaacacacgtctgcggcgtaatacacatcaaggcccggcatcttattgaatccaaccacccgatcgacagggtggtcgcgcaaatggtgttgcacccaggcataatattctgcgttacgaccgtggttcgtccgggatttaaccggcacgcggattaattcaaagttatccgggcattccccttcccatgactgagtataaacacgaacctgatgccctcgcgccgccacggtttgggcaatgcgcataaaatcacgctgcagaccgccaaaaggaaaatatttatataagcaaaaggcaactctcatagcaggctgtccaaatctatggtgcgtgcctcatgcggcagcattttttccgtcgcggcgataacatcttcagccggaataacggaaaggtattttttattacgatcaagctcatgccgttcaggcatcggctgataatttcctgcccaaaactgaatgatgtcgtcggtccagggacgccagaatacatgatccgtcgcgccaaaaagacaaatgaccggcgttttgactgctgcggcaatatgaccgggggccgaatcaacgccgataaagagatccgcatggtcaatcaacgcacccaattcaggaaagcgagttttacccgccagaccagtaaccggttttgtctcacagccgcgtgcaatagcatccacgcaggccatctcgtctgcggccgggcctgacgtcagtacaacttgataaccgcggcgctgcacggcatcaataacctgcgagaatttatcattatcccagcacttaaatagctgccgtgccgtaggctgaataacaacatattgtcgggtcacaccaagttgtttgagctgttgtcgcatgttttcccaatgttccgggcgatagctcatggtggtttccgtgacatactgttttagcgctaacggctttagcgcggataatgtgcgctcaacagcatgttctcccgcataaggtactaaatgcgtaaagctctttttccatagagcagactgacgattaccgaaatcctgcgagatttttatttttgcgtttaaaaaacgcacaataagcgccacgctccactgatcggtgagattgacgaccagatcatacgagttagcacgcaattttttgattagcgatagcgcgtttttgatcttctcttttgttcctgcgcctttgttactgatgccgtagagtgcattaatctccggattttccgacaatatcggtatggtgttctggtaaagaagcacatcgatttttgcatcgggataattctgcttcagcgtgctgatgacaggggtggtaagtaacatgtctccatgaaaacgcatttttataatcagaattcttcgaaatggcttttccacaagcgactctttggttgaaattgtccggataaataagcagaaaaaagcacgctaccgccccaggcttcacagcaacccgatggctaataccgcactcattttagatgcgctagtgtaacacttctttcgcagcaatccgatacgaataatttttatacacaatcatttttttaatcataaattcaaagagataataatttatccccctcttgtgaatggtcattcccattgtctggggcgacaagggcggcaaatttcaatggattgcgtaaaaatgcaaaaataatggggttcagcgcctggaatcctcgcttctgagccaatttggcgcaaaaatgggaaaagtaatggtaaagcccaggctaaatacatagaatccccagcacatccataagtcagctatttactatgctcgaattgctttacaccgctcttctctaccttattcagcctctgatctggatacggctttgggtgcgtggacgtaaagcgccggcctatcgtaagcgctggggtgaacgctacggattctaccgccgtccgttgaaaccgggcggaatcatgctgcattccgtctcggtgggcgaaactctggcggccatcccattggtccgcgctctacgtcatcgctatcccgatctgcctattaccgtaacgaccatgacgccgaccggctcggagcgcgtccagtccgcctttggcaacgatgttcagcacgtttacttgccttatgatttgcccgatgcgctcaatcgtttcctcaataagattgatcctaagctggtattgatcatggagactgagctctggccaaatctgattgctgcgctgcacaaacgtcatattcccctggttatcgctaatgcgcggctttccgcccgctccgccgcgggttatgcgaagcttggcaagtttgtccgtacgctcttgcgccgtatcaccctgattgccgcgcaaaacgaagaagatggcgaacgctttgtggcattgggcgcgaagaacaatcaggtcacggtcaccggcagtctgaaatttgatatttcagttacgccgcagctggcggctaaagccgttacgctacgccgccagtgggcgccgcaccgtccggtctggattgccaccagcacccacgatggcgaagagagtatcgttatcgccgctcaccaggcgttattacatcaattcccgaatttattactgattctggtgccccgccatccggagcgtttcccggatgctatcaatcttgtgcgtcaggcagggttaagctacatcactcgttcttcgggcgaagtaccgtccgccagcacccaggtcgtggtaggcgataccatgggcgaattaatgttgctctatggcattgccgatctcgcctttgttggtggttcgctggttgaacgcggcggtcataacccgctggaggccgccgctcatgcgattccggtactgatgggtccgcatacctttaactttaaagatatttgcgcccgtctggatcaggcgagcggacttatcacgattaccgatgcggctacgctggcaaaagaagtttcctctttactgaccgacgctgattatcgtaatttctacggacgtcacgcagttgaagtgctgtatcaaaatcagggcgcgctccagcgtctgctgcaactgctggaaccttatctgccaccgaaaacgcattgaggactgtcatgcaaaaacgggcgatttatccaggtacgtttgatccgattactaacggtcatctcgatattgtgacgcgcgcaacgcagatgttcgaccatgtcattctggctatcgccgccagccccagcaagaaacccatgttcaccctggacgaacgtgtggcgctggcgcaaaaagcgaccgcacacctgggtaacgtagaggtggtaggctttagcgacctgatggccaatttcgcccgcgacagacaggcgaatatcctgattcgtggtctgcgcgcggtggcggattttgaatatgaaatgcagttggcgcatatgaatcgccatctgatgccgcaactggaaagcgttttcctgatgccgtccaaagagtggtcgtttatttcatcgtcgctggtcaaagaagtggcgcgccatcagggcgatgtgacccactttctgccggacaatgtgcatcaggcgctaatggataagttgaaataagtttcctaccttgccgggcctggcattttacttctgacagtgacggcaatagaacgtcgcgcgctgtgcgtgtttcgttgcgactatcggcgtaccgcatacccgacacggctcgcctttgcgcccgtacacctgcaactcctgggcaaaatagcccggcttcccatcgctttgcagaaaatccttcagcgttgtcccgccttgttcaatagagcgcagcaaaacggctttaatcacccgcgccagcaggtcgcactcctctgtcgagagtgacgacgccaggcggtcagggtgaataccagcggcaaacagcgactcgctggcgtagatattccccacgccgaccaccagcttgttatccatcagccagggtttaatcgccgtcttcttcttcgcgcatttctgctgcaaatattcgccattaaactcatcgcttagcggctccggtcccagatgcgccagtacgttatgcccttccagctctttggtccataaccaggcgccaaagcggcgaggatcggtataacgtagaattttgccgttgctcatcaccaaatcgacatggtcgtgcttttccgccggcagcgcttccggcagtatccgcaagcttcccgacatccccaggtgaataattatccagccgtcaggcagctccagcagtagatatttagcacgacgctgaacgctaaggacgggtgtatcgctcagacgataaatttcatctgaaaccggccagcgcagacggccgttacggatatgggcgtgcaggatagtagcgccaactaaatggggttcaataccccggcggctggtttcaacttcgggtaattcaggcataacgtctccggctgtgtggcaggtctcattaatatggggacggccagaaaacaaaaaaccccgccgaagcgaggtttttgttacatcaaagcgagaattatttgattttcgcttctttgtagatcacgtgctgacggacaactggatcgaattttttcagttccagtttttccggtttagtacgtttgttcttcgtagtggtatagaagtgaccagtaccagcagaagaaaccagcttgattttctcacgaatacctttagccatgatttatttcctcttagtacttagtacttttcgccacgggcacgcagttcagacagaactgtttcgatgccttttttatcgatgatacgcatacctttagcagatacacgcagggtgacaaaacgcttctcgctctcaacccagaaacggtgagagtgcaggttaggcaggaaacggcgtttagtcgcgttcagtgcgtgggaacggttgttaccggtcaccggacgcttgccagtaacttggcagactcgggacatgtctattctccaaaaatcaaattagctcgagcttcgtatggggtatcggcgcctcgtcaggctttacagcctggtcatcgcgcagttctattgaactctcgattgccaggcccaaatgccaaacccgagattctcaaaggtggcgtagtatacgctgacccggcgatatgctcaagtcccgaacagacaaagatcccgatggatcgcgcaaagaatcttaaatccagccgcgttcggcaaaagaaacgtactctccgcgcccaattatcaggtgatcgagcacccggatatccataaactggcaacactttatcacgcgctcagtgataagtttatctgctttacttggctctgcgcagcctgaagggtggttatgcgccagaatgaccgctgaagcattgagtttaatcgcttcccgaacaatctcacgcggatgcacctctacgtggttaagcgtgccggaaaacaggcggctgtgctgaagcacccggtgctgggcatcgaggaagatcaccagaaagatctcacgctcttcgcccgtcagttggctttgcagaaattcccgcgtcatttccggactcagcaacgcactttcctcattcatgcgcacgctgtaatagcgccttgccagctcagcaatgcctttcaactgcgcgaatttcgccaggccgatgccgtttacgccgcgaaactgcgcaaagtccgccgacagcaggccatacagcgacccaaagtgctgcaatatctcttttgccaacgtcataacatcttttcccggcgtgccggtacgtaaaaaaagcgccagcagctccacgtcgctgagggaagcaatgccggatctgagcattttttcacgcggcaataattcgtccaacgtatccatacgcgcacctccttttttaaggaagcggcatagtggcacagcctttgggagagatcgacgccccgattttgttcttgcgtagcgcctcgcaaagtggagcgcaggcaaagacacgacgccgtagagattgtgataaaatagccgcctttcaaagtcacccaacaggaaagacatgatgagcctggccggtaaaaaaattgttctcggcgttagcggcggtatcgctgcgtataaaacgccggagctggtgcgccgtttacgtgagcacggcgctgacgtgcgcgtggcaatgaccgaggcggcaaaagcctttattacccccctgagcttacaggcagtgtcgggctatcccgtatccgacagtctgcttgaccctgccgctgaagccgcgatggggcatatcgagttggggaaatgggccgacctggtgattcttgcccccgcgaccgccgacctgatcgcccgtgtagcatcgggtatggctaatgatttagtctccaccatttgcctggcgacgccagccccggtggccgtgcttccggccatgaaccaacagatgtaccgcgctgccgccacgcaacataatctggaggtgctcgcctctcgcggcctgttcatttgggggccggatagcggcagtcaggcgtgcggcgacgtaggcccaggccgaatgctggacccattagttatcgttgataaggccgccgcgcatttcgctgccgtcaacgatttgcgacatcttaatatcatgattacggcaggtccgacgcgcgaaccgctcgacccggtgcgttatatttccaaccacagctccggtaaaatgggcttcgctattgcggcggccgcagcgcgtcgcggcgcaaatgtcacgctggtctccggtcccgtttcgttaccgacgccgccttttgtaaaacgggttgatgtcataaccgcgctggacatggaagccgctgttcaggccgccgttcaacagcagcacattttcattagctgcgccgccgtggctgactatcgcgcagagactatcgccagtgaaaaaatcaaaaaacaggcggcgcaaggtgatgaattactaataaaaatggtcaaaaacccggacattgtcgccggggtggccgcactcagtgacaatcgaccctacgttgttgggtttgccgcggaaacgaataatgtggaagaatacgcccggcaaaaacgtatccgtaagaaccttgacctgatttgtgcaaatgatgtttctctttcaaatcagggatttaatagcgataaaaacgctttacaccttttctggcaggatggagataaagtcttaccgcttgagcggaaagaactcctgggccaattattactcgacgagatcgtgacccgttatgatgaaaaaaatcgacgttaagattctggacccgcgtgttggtcagcagtttccgctgccgacttatgctacttctggttctgccgggcttgacctgcgcgcctgtctcgacgacgccgtagaactggcgcctggcgcaacgacgttggtacctaccggactggccattcatatcgccgatccatcactggcggcagtcatgttgccgcgttcgggcctgggccataaacatggtatcgtgctgggcaacctggtcgggctgattgattccgattatcaggggcaactgatggtttcgatctggaaccgtggtcaggacagttttaccattgaaccgggcgaacgtatcgcgcaaatggtgtttgttccggtcgttcaggccgaatttaatctggtggaagcatttgacgccaccgaacgtggcgagggcggcttcggtcattctggccgtaagtaaattttacgcatccccataacgtcataatactgccgcaagcgctgagtttgcggttatagcgtgggtgctcgcctggcaagtgcttattttcaggggtattttgtaacatggcagaaaaacaaactgcgaaaaggaatcgtcgcgaagaaatacttcagtcactggcgctgatgcttgaatccagcgatggaagccaacgcatcacgacggcaaaactggcggcctcggtcggcgtttcagaagcggcgctataccgccattttcccagcaagacccgcatgttcgatagcctgattgagtttatcgaagatagtctgattacccgtatcaatctgattttaaaagatgaaaaaaacaccagcacgcgtttgcgcctgattgtgttgctgattctgggttttggcgaacgcaaccctggcctgacgcgcattcttaccgggcacgcgctgatgtttgaacaggatcgcctgcaggggcgcattaatcagctttttgaacgcatcgaagcgcagctccgccaggtgctacgagaaaaaagaatgcgtgaaggcgaaggctacacgacggatgaaaatctgctggcaagccaactgttagccttctgtgaaggtatgctttcacggttcgtgcgtagcgaatttaaataccgcccaacggacgatttcgacgcccgctggccgctcattgccgctcagctacagtaacgctgactggatagtggctcacgccttatccaggcgacagaaacataggcccggtaaagcgccaccgggcaattcgcttacacgccaaattcttcccggtatgctcgcacagccgccagatgctcagccatatcaggtttttcttccagataggcaatcaggtctttcagcgtaatgatggagataaccttacaaccatagtcgcgctccacttcctgaatcgcggaaatctcgccgcggccacgttcctgacgatccagcgaaatcagtacgccagccagcgtagccccgtgcgcctgaataatctccattgactcgcgaatcgccgtacctgcggtaatcacgtcatccaccagcatcacgcggccctgtagcgcgctgcccaccaggctcccgccttcaccatgatcttttgcctctttgcggttaaagcagtacggcaggtctttatcgtgatgttccgccagcgcaaccgccgtcgtcgtcgcgatcggaatacctttgtacgcggggccaaacagcagatcaaattcaataccggaatccaccagcgcttcggcataaaaacggcctaacaacgccaggtcgcgcccggtattaaacagcccggcgttgaagaaataggggcttttgcgcccggatttcagcgtaaactcgccaaactttagtacctgcttgttaagcgcaaactcaataaactggcgctgatacggtttcatggattcgctccttttcttactttcatcatttacgaaatttacggacaaaaaaaaggcgacttttcagtcgccttaaaatcaattttctaacgccgccttctgcgtcgccacaatggattcaattccccctcgggccagcgccaacaaagtgagaagttcttcatggctgaacggctcgccttccgcggtaccctgtacttcaataatacggccgtcttcagtcatcacgacgttcatgtcggtttctgctgcggaatcttcaacatattccagatcgcagatcgcttcgccgttaacgatgcctacggaaaccgccgccaccatgcctttcatcggattggttttcagcttaccgttggcaaccaatttattcagcgcatccgccaacgccacgcaggcaccggtaatagacgctgtacgcgtaccgccatcggcctggattacatcgcagtccagcgtaatggtaaattcgccgagcgttttcagatcgaccgccgcacgcagcgcacgcgcgatcaaacgctgaatttccatagtacggccgccctgcttaccctttgccgcttcgcgcgcgttacgggtatgggtagcgcgaggcaacatgccatactctgcggtgatccacccctggccttgtcctttcagaaaacgtggaacgccctcttcaatggaggcagtgcacaacactttagtatctccaaattcgaccagtaccgagccttcagcgtgttttgtatagttacgggtcagggttacgggacgcacctgattagcgctacggcctgctggacgcatattgagatctccggcttaaaacgaatgtggctgcgcattatacggacttccgatggttattcctatcctgacaaggcctggatagctataatcccctcatctctcctttaaaaacgggaacatctatgatccgcagtatgaccgcctacgcccggcgtgaaatcaagggtgaatggggtagcgcgacctgggaaatgcgctcggtaaaccagcgttatctggaaacttactttcgtctgccggaacagttccgtagtcttgaacccgtcgtgcgcgaacgcattcgtacacgcctgacgcgcggcaaagtcgaatgtatgctgcgttttgaacccgatgccagcgcgcaaggcgagcttattctgaatgaaaagctagcgaaacaattagttagcgccgcaaactgggtcaaaatgcagagcgacgaaggggaaatcaatccggttgatattttgcgctggccaggtgtcatggcggcgcaagagcaggatctggacgcgattgccgcagaaattttagccgcactggacggtacgctggatgactttatcgtcgcgcgcgaaacggaaggccaggcgctgaaagcgctgattgaacaacggctggaaggcgtcagcgccgaagtagcgaaagtccgcgcgcatatgccggaaatcctgcaatggcagcgtgagcgcctggtcgcgaagctggaagatgctcaggttcagttggaaaacaaccgtctggagcaagagctggtgatgatggcgcaacgcattgatgtggcggaagagctggatcgtctggaagcgcacgtcaaagagacttacaacattctgaagaaaaaagaggcggtaggtcgccgtctggacttcatgatgcaagaatttaaccgtgagtcgaacaccctggcctccaaatccatcaacgctgatgtaactaactccgctattgaattaaaagtgttgatcgagcaaatgcgcgagcaaatccagaatattgaataattctggcgctcaatatgtcacagagcccgccttatgcgggctctcgcgtttatcggtagtacgtttttaatttccggcgaatagcgtcgataaggcgtcgcttccactctaccgttgaagcccgatactgcataaaaatagcgccttccgcctgctccccggcaagcggcaggacaaaaagaccgcgcttatcggataaattttcataccaggggcgcggtacaatcgccattagcggcgccgactggacagcaggcgcaagttgactgtaatcatgacaaacaaacgccagcggacgttcaaacccggcacgagcctgctgcctgtccagttcgttgttctcttttgtccacggcaaacagtaaatgtgttgataatgctgtagatcagcaaaattcaacgctgtggcattctccagacgtgaacgcaatggcgcgccataaaccgcgatcaaacgcgtagtccccacccgctcgtaatgcagagcgctgacctgcttttgatggtcgccaattgccagcaccaaatcaaccgagctatccaacagttcatcacgccagggtcggcgggcaaaaggaaggcactcgatcaccgcctgatgaagatgacctttctctgcgagaactggcgtaagcagcgcgttcaatgcgggaggaagtaccacccgaaaacaacgggagccgttctctttatcgccaaacagctcctcattaagcgaaacaaacacaggcgccaatttgtcacgcagcgcctgcgcataaggcgtaggaatctggcggttcccttcccgtcgaaacaacgggtcgtttagcgcatcgcgcaatctcattaacgcatgacttaccgcagaaggcgacaaagccagcttttgcgccgttttccccgtagagctcgtctccagcagcacatacagtacttttaacaggttcatatccatttgcagcaagttcattaaacgtctctcttattgaacctggctaaattactgccaggtatactgcgggcgcttcaatcaggagaacattatgaatcgctatgcattattccttgtatgtatattttcaacatcagcacttcctgccatggcggcattagatccttcacaaccgttatcacccgcgcctccgttatcactgtttaaagcgtgggctaagcctataaagccgtttcaaatcacagaaggcgtgtggtatgtcggtacgaaaaatctctcttctattctgctgaccactccggcagggcatattcttattgatgcggggttggatgaaagcgcaccgcaaattaaagcgaatattgaagcggcaggattccgcctcacagacgtgcgctatctgttgaatagccatgcgcggctggatcaagcggggggcatggcacgtttgaaagcgtggagcggcgcacaattggtcgccagccaacccaacgccgatcagatggcgaggggtggacgacaggattttgcgcttggcgatgcgctcccctttccgcccgtcaccaccgataaaattatccaccaccaggaaagcatcatcctcggagggataaccgtgacagcactattcacgcctggacatctgcccggctcaacttcctggcgcgtaacgctccgcaacggcaagacgctaatttacgcagatagtctcgccacgcccgactatctgctgattaacaacaaaaattaccctgacctggttactgatattcagagcagctttaagacactggccgcccagcatgttgatatctttattgccaacaaaggtgaccgcttcgggctactggagaaacgacagcaacttcgcaacggcgatacacaggcattctttgattccaatggcttgcaacagtatgtggaacgctcgcgccagcgcttcatcacacaacttaccgcacagcagccataatgaaataactcaccggcggcgcgtccagggcgccgttcttttaaattatctaagtcaaaatagaaaaacctcgcatacaataaaccacaaaaatgatgttcaatttattgatatttataataaataattattaattataaatttaaaatcattactaaaatttattaatcgtgtaatgccttagaaaatctcaatcgtgatacagcgcacaaatcgttaatcttcgcccccagtaaattagggggaaatcatgctgttgcacgttctttatttaattggcatcactgccgaggccatgacgggcgcactcgctgcgggtcgtcgtcgcatggatacattcggcgtaattattattgctaccgccaccgccattggtggaggctcagttcgcgacattctgctcggtcactatccgctgggttgggtgaagcatcccgaatatgtcattattgtggcgactgccgctgtattgaccaccattgttgcccccgtcatgccctatttacgcaagcttttcctggtacttgacgcgctggggttggtggttttctctattattggcgctcagatagcccttgatatgggcgaagggccaattatcgccgtggtggccgccgtcactactggcgtctttggcggcgtgctccgcgatatgttctgcaaacgcattccactggtgtttcaaaaagagctatatgccggcatttcgttcgcctcggcggtgctctatattgcgctgcaacattacgtcatgaatccggatgtcgtcgttatctctacgctactgtttggctttacagcaaggttattagcgctacgtcttaaacttggcctgccggtattttattaccgccatgaagggcactaagacccaaatccgggaatatgctgagcagccagccatctgctcagcgctttgatctgcagattattccgccagtcgatgactctcccggcacgacgctcgcccgtcgctggtaactgccgccagtgttgctctgttcgcattaataactgctcccatgaacgatcgccgctggcctgtaatgcagcctgcgttaaggggatatccatcgccatgatccagcgggtaaacggctgccggcgcgccaggttaaattgccgccatatctgctcgctttttcctttagcaaagcctggcgtgttggctatttgcgctgacgtcagggtaagccaggagaagatatgctcaaagcgatgcgtctgatgcaaggcccgccagctggcttcacccattccgtccagacccaacgccgaccgtgaccccagccatatcagcctggagataaactgttcctgacacgttgccgacgcgtaaaagcaggtcagcgagttgaaatggctatcaggcggtacaggcttactccgctcacgactccgccagacgacctcatcaagccggggaatgccttgcccggccagactcaccaggatctgatcgcccggcgcgatatcccacgcttcccaacgtttcacagaaccgatattgacccgctgaacccgcttatcatccaatataacggggacaagcgacgctactacggtaattttgccgcttttccccaccgagaactgaatagcgctcacttgcgcgacctgcgctactggcggatatttccatgctgccagccagtcgccctgcccgggtcgccagtgttgtgacgcaggttctttagccatgcgtatcactacgccatccgttacaaagggtaatgctgacgtcagccatgactggcgcgcccgctcgacctcgctggcatcttttaccgccagggtatatttattcgtcagactgaatccagccttagcaagttggcttaatctttcgggcatatttgccggaccgtccggccacgcccaaataaaaatacccaacgaatttagcgcggaggcgttatcctggcgcattaacattcctgcgactttcgagcgcgcattcatcccgcccatccgttgctggatatgtccctcgcgctgtagaaagatttcgccctgtaacaccgcgttagcaagcgcgccttgtgttgtctgcggtatagaggggatcaggcgaatttttggcgtccagtcctcgccttgtagtccgttaccccggctaatggccctggtcagtttaccgttttgataaaccagtgttaccgctacgccatccacttttggctgtacccaaagctcgctgcgcccgcgcatccactgttctaccgcctgtcggtccacgagtttacgtacgcccgtgtgcgcaacagggtgcattgttgtaccgtttaacggcggtgaaaccggagtagatgaaacatcctgaccaacacagcgttgccactgaaccagccttgcgctgagttggtcgtacacactatcgtcaaccgcgctaaccccttgtttccagtagatgtcattccagtcagcgagctgttgctgtaaacgggcgatttcttcagcggcccttgctggcggccaggccgggcaaagcgccccactctgcgaatgccacaataaaattccccacgccatacttttccataatctcatcacgacctcctgcgcacattgcccggcaggtatagcgctttagtgaataaaaaccgacaggtaaaaatgcatcatccgagccgctttccagattttttggtgggttgctgcaacgacgcgataaaagcggaaaaagggacgcaaaatgcaataatctggcgcaaaaagtgtgacaaagactacgtcgcataacggcgatgtgtataataagcccgtatcaaggctctatttcgataatcacagacgtaagatactcatggctcaaggtacgctttatattgtttctgcccccagtggcgcgggtaaatccagcctgattcaggctttattaaaaacccaaccgttgtatgacactcaggtttccgtttcacataccacgcgcgcgccgcgtccgggtgaagtgcacggtgagcactatttctttgtaaatcatgatgagtttaaaaccatgattggcagggaggcgtttctggagcacgcggaagtgtttggcaattactacggcacttcgcgcgaaaccattgagcaagtgctggcaaccggcgttgatgtttttctggatatcgactggcagggcgcccagcaaattcgcgaaaagatgccgcaagcacgcagcatttttattttgccgccgtcaaagatcgaattggatcgccgtttacgcggccgcgggcaagatagcgaagaagtcattgccaaacgaatggcgcaagcggttgcagaaatgagccattacgccgaatatgattatcttattgtgaatgacgactttgataccgcgttaagcgacttgaaaaccatcattcgcgctgaacgtctgcgtatgagccgccaaaagcagcgtcataacgctttaatcagcaaattgttggcagactgaacccactttcagtatcatgcccagtcatttcttcacctgtggagcattttaagtatggcacgcgtaactgttcaggacgctgtagagaaaattggtaaccgttttgacctggtactggtcgccgcgcgtcgcgctcgtcagatgcaggtaggcggaaaggatccgctggtaccggaagaaaacgataaaactaccgttatcgcgctgcgcgaaatcgaagaaggtctgattaacaaccagatcctcgacgtccgcgagcgccaggaacagcaagagcaggaagccgctgaattacaagccgttaccgctattgctgaaggtcgtcgttaatcacaaagcgggtcgcccttgtatctgtttgaaagcctgaatcaactgattcaaacctacctgccggaagaccagattaagcgtcttcggcaggcgtatctcgttgcacgtgacgctcacgagggccagacacgttcaagcggtgaaccctatatcacgcacccggtggcggtggcctgtattctggccgagatgaaactcgactacgaaacgctgatggccgctctgctgcatgacgtgattgaagatacccccgccacctatcaggacatggaacagcttttcggtaaaagcgttgccgagctggtagagggggtgtcgaaacttgataagctcaagtttcgcgataagaaagaggcgcaggccgaaaactttcgcaaaatgattatggcgatggtgcaggatatccgcgtcatcctcattaagcttgctgaccgtacccataacatgcgcacgctgggctcgttacgcccggataaacgtcgtcgtattgcccgtgaaacgctggaaatctacagtcctctggcgcaccgtttaggtattcatcacatcaaaaccgagctggaagagctgggttttgaagcgctgtatcccaatcgttaccgcgtcatcaaagaagtggtaaaagcggcgcgcggcaaccgtaaggagatgatccaaaaaatcctctctgaaatcgaaggacgtttgcaagaggcgggaattccgtgtcgcgttagcggtcgcgaaaaacatctttactcgatctactgcaaaatggtgctcaaagagcagcgttttcactcgatcatggacatttacgctttccgcgtcatcgttcatgactccgatacctgctatcgcgtactcggccagatgcacagtctctataagccgcgtccgggacgggtgaaagactatattgccattcccaaagcgaacggctatcagtctttgcacacctcaatgatcggcccgcacggcgttcctgttgaagtccagatccgtaccgaagatatggatcagatggcggaaatgggggtcgcggcgcactgggcgtataaagaacacggtgagaccagcaccacggcgcagatccgcgcccagcgctggatgcagagcctgctggagctacaacagagcgccggtagttcgtttgaatttatcgaaagcgtaaaatccgatctcttcccggatgagatttacgttttcaccccggaagggcgcattgtcgaactgcccgctggcgctacgccggtggattttgcctatgcagtgcataccgacatcggccacgcctgcgtcggcgcgcgtgtcgaccgccagccttatccgctgtcgcagccgcttagcagcggtcagaccgtcgaaattattaccgcgccgggcgcgcgtcccaacgccgcctggctgaactttgtcgtcagctctaaagcgcgcgctaaaattcgtcagttgctgaaaaacctcaaacgtgatgactccgtaagcctgggccgtcgtctgcttaaccatgccttaggcggtagtcgtaagctggcggaaattccgcaggaaaatattcagcgcgaattggatcgtatgaagctggcaacgcttgacgatctgctggcggaaatcggtctcggcaacgcgatgagcgtagtggtcgcgaaaaatctgcagcaaggcgaagccgtggtgccgaccgttgcgcaatcgaatcacggccacctgccgattaaaggcgcggatggcgtgcttatcacctttgcgaagtgttgtcgtccgatcccaggcgacccgatcatcgctcacgtcagcccaggtaaaggactggtgatccaccacgaatcctgccgtaatatccgtggataccagaaagagccagagaaatttatggcggtcgaatgggacaaagagacggagcaggaattcattaccgaaatcaaggtggaaatgtttaaccatcagggcgcgctggctaacctgacggcggcgattaataccaccacctccaatattcaaagcctgaatactgaagagaaagatggtcgcgtctatagtacctttattcgccttaccgcacgcgatcgcgtacatctggcgaatatcatgcgcaaaatccgcgtgatgccagacgtcattaaagtcacccgtaaccgaaactagcgctatgaatccaaaacgttatgcgcgtatatgcgaaatgctcgccaggcgtcagcctgatctcacggtctgcatggagcaagtccacaaacctcataacgtttctgcaatcattcgtaccgcagatgccgttggcgtccatgaagtccatgccatctggccaggtagccggatgcgcaccatggcttctgcggcggcgggcagcaacagttgggtacaggtgaaaactcaccgtaccattggcgatgcggtagcccatttgaaaagtcggggaatgcagattctggcaacccatctttctgataaggccgtagactttcgcgagattgattacacgcgcccgacctgtattctgatgggtcaggagaaaaccggtattactcaggaagcattagccctggcggatcgggatatcatcattccgatgatcggcatggtacagtcgctgaacgtttccgtcgcctccgcgctcattctttatgaagcccagcgccagcgacagaacgcgggcatgtatctgcgtgaaaatagcatgttgccggaagatgaacagcagcgcctgctgtttgagggtggttatccggtgctggcgaaagtcgctaaacgtaaaggtctgccttatcctcgcgtcaatcagcagggcgaaatcgacgccgatgctgactggtgggcgacgatgcaggcggcagggtaatcaccatgtcaggccgcttgttagacgctgttccgctcaattccctgacaggcgtcggcgcagcgcaaagcagtaaactggcgaaaattggcctgcacaccgtgcaggacctcctgctccacctccctctgcgttacgaagaccgcacccatctctaccccattggcgaactgctgcctggcatctacgccaccgttgaaggcgaagtgctgaactgcaatatcactttcggcggtcgtcggatgatgacctgccagattagcgacggttccggcattcttaccatgcgctttttcaattttaacgcagcgatgaaaaacagcctggcgacgggacgacgtgtgctggcctacggggaagcgaagcgcggcaagtatggcgcagagatgatccatccggaatatcgcctgcagggcgatctcagcacgccggaacttcaggaaacgctcacccccgtctatccgaccaccgagggcgtgaagcaagcgacactgcgcaagcttaccgatcaggcgctggagttgctcgacacctgcgccattgccgaactactgccgccggaactggcgcagggtatgatgagcctgccggaggcgctacgtaccttgcatcgcccgccgccgacgctccagctcgccgatttagaaaccggcaaacacccggcgcagcggcggcttattcttgaagagctactggcgcataatctcagtatgctggcgcttcgcgcaggcgcgcagcgctaccacgctcagccgctaagtaccaacaacatattgaaagacaagctgctggcgtcgttgccgtttaaacccaccagcgcgcaggcgcgggtggtagcagagatcgaacgtgatatggcgctggatgtgccgatgatgcgtctggttcagggcgacgtgggttccggtaaaacgttggttgcggcgcttgccgccttgcgcgctattgcccacggtaagcaggtggcgctgatggcgccgaccgaattgctggctgaacagcacgcaaataatttccgcaactggttcgaaccgttgggcgttgaagtgggttggctggccggtaagcaaaaaggtaaagcgcgtcaggcgcagcaagaggctattgccagcggtcaggtgcagatgattgtcggcacccacgctatcttccaggaacaggtgcagtttaacgggctggcgctggttattatcgatgagcagcaccgctttggcgtccaccagcggctggcattgtgggaaaaaggccagcagcagggctttcatccgcatcagttgattatgaccgcaacgcccattccgcgcaccctggcgatgactgcctacgccgatctcgatacctcggtgattgacgagctaccgccgggccgtacccctgtcactaccgttgcgattccggatacccgtcgccatgaaatcattgatcgtgtgcgcaacgcctgcacaaccgaaggccgtcaggcctactgggtctgtacgctgattgaagagtcagacctgctggaagcgcaggcagcggaagccacctgggaggagctcaagctggcgttaccggagttgaatatcggcctggtacacggccgcatgaagcccgccgaaaaacaggcggtgatgcaggcctttaagcagggcgaactgcatctgctggtcgccactacggtgattgaggtgggggtcgatgttcctaacgccagcctgatgattattgaaaacccggagcgactgggcctggcgcagttacaccagctcagagggcgcgttggccgtggcgcggtcgcatcgcactgcgtgctgctctataaatcgccgctgtcgaaaacggcgcagaagcgtttacaggtattgcgcgacagcaacgacggctttgtgattgcacaaaaagatttagagattcgcggcccgggggaattactgggcacgcgccagacgggtaacgccgaatttaaagtagctgatttgctgcgcgatcaagccatgatccccgaagttcagcgtattgcccgtcatattcacgaacgttatccacagcaggcacaagcgctgattgagcgctggatgccggaaaccgaacgttattccaacgcctaatcctattcgccgcgcgacagagccaacagaagatcctcaatctggatagcgataacgtcctgggctgccagggcatcgcgcgagatacgcgttgccatcgcactctccggctcgtcccgcagcatttccgccgccttctgcaccccgtcgaggatcatctccgacgttaactgccgggttaaaaacgccagattattttccaaccacggttcttccgtcgcacctaatggcggttgccactgccacgagccttctggccaaagcgggttaacctctaccggataaattaaatgtgcggcgtactgcaacgcgcataccgctttacccggcgtatccagtaaccaccactgattccagagcgaacggataaacggcgcaatgccgccgagaacattgaaggtatccagccaggtcagcggagagttgaaaccgcgctcgtgattgattcgcgccagcatggtctccagcaaaaaatgccgtacctgctgacgctgagcggcatccatcatttcccgccagagataaggccgccgtaacgcacgcaggaaagactcctcgaagtgatcgccatagccatgggttaacagcgtttcgcgccaacaggcaaggcacagcggaaacagataacgaaacaattccggctgcatcggttcgtggtaaaccagattcagcacataataaacgctcagatgccaatcggtaatctgccgccagtccgtcgccgccagcgcctgcaactcagcatcggcatagtcaaactccgcttcccacacgttaagaaccggcggctcatcgccaaaaatatgacggcagcgttcacgcagggtttcaggttgacggcaacgttttttcatctttatccggcaaacattggcagcatcaggtacagcttgatcaccaacgcattgacgatatcgataaagaacgcgccgaccatcggcaccaccaggaacgccatatgcgaggggccaaaacggtcggtaatcgcctgcatattagcaatggcggtcggcgttgcgccaaggccaaaaccgcagtgacccgccgccagcaccgccgcatcatagtttttccccatcatgcgccaggtgacgaagatcgcgtacagcgccatgaagatggtctgtaccaccagaatcgccagcatcggcagcgccagtgacgccagttcccacagcttcaggctcatcagcgccattgccagaaacagtgacaaactcacgttccccagcaccgaaacagcacgctcaaatacgcgataaaaacccaccagcgccaggccattgctgaggatcaccccaacaaatagcacacaaacgaagaccggcagttcaagcaccgttcccgccagtagctgcgctacgattttgcccacggtcaaacagatagcaatcagggcgatggtttcgattagcaccagagaggtgatcatacggcccacatccggcttttcaaaggctgtcggcacggcctgatcgtcaggcattccatccggcgtggtggagtgtttcaccagataacgcgctaccgggccgccaatcaacccgcccagcaccaggccaaaggttgcacatgccatcgcaacttcggtggcactggcaaaaccataacgttcgacaaacagtttactccacgccgcgccggtaccgtgtccgccggacagcgtaattgacccggcaatcagccccattaacgggtccagccccaacagactcgccatgccgataccgatggcattctgcatcagcagtaatccgaccacgacgaccaggaagacgccaacaacgcgtccccccttgcgcaggctggcaaggttagcgttaaggccgatcgtcgcgaaaaacgccagcatcaacggatcgcgcagggtcatatcaaagttgacctcccaaccgacgctttttttcagtaccagcagagcaaccgcgaccagtaatccccccgccaccggttccggaatcgtatatttcttcaataaggagacagactggaccagcttgcgacccagtagcagcaccagcgtggcggcgacaagggtcgataaggtatcgagttcaaacatttaaagctcctgtagtgcgctgtgacatgtgcgcacaaatcatttcctgagtcagttttttagctctttgcgagtcttcggcatggattttaagcagaaaaaggcaaaaagttatataaaaaggtgcatttatcttttttaaatattaagaatattcgctcgcaatcgtttgcttttaccatctggtcagataaaatcaccgcttttccaccacgagaatgtccctgatgtccgttaacgccatcgagccggcagatgcgcaaccggttgcgcagacgcaaaacagcgaattaatttaccgtcttgaagatcgcccgccgctccctcaaaccctttttgccgcttgtcagcatctgctggccatgtttgtcgcggtaatcacgccagcgctgttaatctgccaggcgttgggtttaccggcgcaggatacgcagcacattatcagcatgtcgctgttcgcctccggcgtagcctctattattcaaatcaaagcgtgggggccggtaggatcggggctgttatccatccagggaaccagttttaactttgtcgccccgctgattatgggcggtaccgcgctgaaaaccggcggcgcggacgtcccgacgatgatggcggcgctgttcggcacgctgatgctggcaagctgcaccgagatggtgctttctcgcattctacatctggcgcgccggattatcacgccgttagtctccggcgtcgtggtgatgattattggcctgtcgctgattcaggtggggctaacttccatcggcggcggctatgccgccatgagcgacaacacctttggcgcaccgaaaaacctgttactggccggcgtcgtcctggccattatcatcctgctgaatcggcagcgtaatccctacctgcgcgtggcttctttggttattgccatggcggcaggctatcttttggcctggtttatgggcatgttgcctgagaataacgcgccggtctcacaggacatcctgatggtgccgaccccgctgtattatggtctgggcattgactggaacctgttactgccgttgatgctggtctttatgattacgtcgctggagaccatcggcgacatcaccgccacctctgatgtctccgagcagccggtatccggccccttgtacatgaaacggctaaagggcggcgtactggctaacggcctgaactcatttgtttcagcggtatttaatacgttcccgaattcctgtttcggtcagaacaacggcgtcattcagttgaccggcgtcgccagtcgctatgtgggatttgtcgtcgcgctgatgctgattgtactcggcctgttcccggcggtaagcggttttgtgcagcatatcccggaaccggtgctcggcggcgccacgttggtgatgttcggcaccattgccgcctccggggtgcgtattgtctcgcgtgagccactgaaccgccgcgcgattctgattatcgccctgtcgctggccgtgggtcttggcgtctcgcaacagccgcagatcctgcagttcgcgccggaatgggtgaaaaatctgctctcatccggaattgccgctggcggcatcacggctatcgtgctgaacctgattctcccgccggaaaaaccgtaaaaaccctgcggcggcgacacgattcgccgctgctgtaacgctctttcaccattcctgtcttgaggattgcacgcaaatcgtgcataaatcccctatgtgcatttcacgggatggaagaccatgaaattgattgggaggttgcttctctacgtgctgatcgcctgtttagtggtgattttcggcttttattttctgctgcaaacgcgctggggcgcagatcatgtcagcaactgggtatcagagaacagcggttatcacctcacattcgacgtgatggatcatcgtttttccgccccatcccatcttttactggagaatgtgacctttggtcgtgatggtcagcctgctaccctggtcgcgaaaaccgtagatatcggtctgagcattcgccagttaaccgcgccgctgcatgtcgacacgattctgttacaggacggcacgctgaatatttcagtgcaaaccgcccctttcccgtttgaggccgaccgcctgcaacttcgcaatatggcgctcaatagccccggtagcgaatggcgattgagcgcccagcgcgttaacggcggcgttatgccctggcgccccgaggccggtcgggtattgggcaataaagcccagatccaactgagcgctggttcgctgacgttaaacgacgttcccgccacgaatgtgcttattgaaggcagtatcgaccataatcaggtgatgttaaacaccgtcggcgccgatatggcgcgcggagcgttaaccggcgtcgcccggcgtaacgctgatggtagttgggtcgttgaaaatctgcggctgaatgatattcggttacaaagcgataaatccctgagcgagtttttcgcgccgcttactacggttccatctttgcagattagtcgtcttgaagtgacggactccagcctgcaaggaccagactgggcagtcaccgatcttgacctgagtttgcgcaatctgactctgcgcaaagaagactggcaaagccaggaaggtaaattatcgatgaatgccagcgagtttatttacggctcactgcacttgctcgatccaatcctgaacgccgaattttcaccacagggcgttgcgctacgccagttcactacccgctgggaaggcggtatggtcagaacttccggcgcctggttacgcgaaggcaaagcgcttattctggacgataccgctatcgccgggctggagtatacgctgccggaaaactggaagcagttatggatgaagccgctgcccgactggttgaacagcctgacgctgaaaaaattcagcgccagccgcaatctggtgattgatatcgacccggccttcccgtggcaaatcaccgctctggacggctacggcgcaaacctggagctggtacaacatcatcaatggggcgtctggagcggcaatgcgaccctcaacgccgcagcggcaacctttaaccgtgtggacgtgcgccgcccgtcgctgtcgttgacggctaatgccagcacggtcaacatcagcgatctgagcgcgtttactggaaaagggatactggaagccactgccagcgtatcgcaactgccgcagcgtcagacgcaaatcagcctgaacggacgcggcgtaccaatggatgtgctacagcagtggggctggccggcattaccgattgctggcgatggcaatattcagctcacggccagcggcaatattcaggccgatgcgccgttgaaaccgacggtaaacgggcaattacacgcggtcaacgcacaaaagcagcagataacacagacgatgcaagcgggcgtggtgtccggcggggaagttacgtcaacggagccaacgctgtaattgagggcttgcccggtggcgatggcgcttaccgggcttacggttcttgctcatttgtaggccggataagcgcagctcacggcgccatccggcgattcagatttaaagcgtaatcaccacttcatttccctgcggggtgaccactacgcccagttcacttcccgcatatgagccgcatttggtaccgctaatctgcgtaatattacgcagacacagcgtccagttgcgcgccttgccttcgccgctcaccgtaatggtattgcctgtgcgtttcgcctgcagcgtaaagattgtcgaaccatccgtagcagggacttcgcagaccgcttcgcagccgtcatccagatggaataactggaaggccgtaccctcatgccaggcgtaatcgggcttctggctattgttgcccagcgccagtagtgtattgtcacgcacgtacactggcagactcaggaagtcatgctgctgtttatgccagcggctgccctgcacttcatcgttgcgccacaggtgcgtccagcggccttctggcaggtagaactccacgtcgcccgcttcactaaataccggcgctaccatgaccgcatctcccagcatgtactggcgatcaagataatcacacgccggatcgtccgggaactccagcatcatcgcccgcatcattggcgtaccggcttcgttggcacgcgccgcttcccgatacagatacggcatcatccggcacttctgttcagtgaagaagcgcaccacgtcacaggactcgtcgtcataggcccacggaacccggtaggatttgctaccgtgcaggcggctgtggctggagagcaagccgaatgcgcaccaccgcttgtagacatgcgccggcgcggtattctcgaatccgccaatatcatgactccagaagccaaaccctgacaggccgatggacagcccgccgcgcaggctttccgccatcgattcgtagttggcgtagcagtcgccgccccagtgcaccgggaactgttgcgcgcccaccgaggcggaacgggcgaacagcaccgcctcttcaacgccgacggtctctttcagcacgttccacaccagttcgttgtagatgtaggcataatggttgtgcattttctgtggatctgaaccatcaaaccactgcacatccgttggaatgcgttcgccgaagtcagttttgaagcagtccactcccatctccaccaggcccttcagcttgtcggcataccattcgcaggcttgcgggttggtgaagtcgtaaatcgccagtcccggctgccatttatcccactgccacaaggagccgtccgggcgttttagcaaatatcctttctctttcagctcctggaagaccggggatttctggccgatgtaggggttaatccacacgcagactttcagccctttcgctttcaggcggcgaatcatccctttcggatcggggaaagtcaccgggtcccattcaaaatcgcaccactggaaggccttcatccagaaacagtcgaagtggaagacgtgcagcggcagattgcgctcggccataccgtcgataaaactgttaacggtcgcttcgtcgtagttggtggtgaatgaggtggtcagccacaggccaaacgaccaggcgggcggcagcgccggacgacccgtaaattgggtatagcggttcagcacgtctttcggggtcgggccgtcgatgacgaagtattccagatactcgctctcgacgctgaactgaactttggagactttctcggagccaatttcaaacgacacgcactgcggatgattcaccagcacaccgtagccacggttggtgatatagaacgggatattcttgtacgattgctcggtgctggtgccgccgtcgcggttccaggtctccaccgtctgaccgttacgcaccagcgcggtaaagcgctcgccaagcccgtagacggtgtcgcccacgccgagatccagacgctcgaacatgtagttgcgcccgctattggtgtcctgcacatagccgttatttttcaactgactaccggtgatacgtacaccgttacgcagaaaatccagtgaccagatctcgcctttggtgacgcgcacgctcaggctgccgctcttgagttcggcaaattcggcgttgttctgcatctccacgttgatatcttgcaagacattgagcggataatgtgggccgttatccaaagcgccctggaagtgttccatccgtacacctatcactccttcctgcggcgagaaaaagcgtagggtaaacaacggggtatccagttgccaggttcgttcgcggacatcacgcggcgcggcatagatcaccatctcattcccgtgctgttcaacgtcgaacacctgaaccgggtgaatcaaattaaggccaggctggatcagccagtttccgtcgctaattttcatagtctgttcctttagttctgcaattctttatgggtaaattcttgttcattacggtgtgcgccctgcgccagttgttccagaatggttttcaggaacgggcttttcagggtgtagtagcgtttagcgatcgcggcgctcagcagataacagatggccgggacgatagtgaacagagcgatgatgatgctgatcgtggcgctgttttgcgttttcgccgccgcgtcgtaaccgccgcctgccagcatccagccaatcagcgccccgccgagggcaagacccagtttcagcacgaacaacgtgccggcaaaactgatccccgtcaggcgtttgccgttacaccattcgccatagtcgacggtgtcagacatcatcacccactggataggcgtgactaactggtgcaatacgccaatcacaaagataaagacgaacatagcgatcgtggcgtgcatcggtacgaagaacatcgccacgctgattactgcgagtaaagcattggtccaccagaaaacgctcactttgcatttccagtcggtcaacggttttgccagcgccgagccaatcaggttgccgacgcaataggtggtgaggaaggcgacaaacacgcccggtttgcccaatatccaggtgacgtaatacatcatcgccccgccgcgcacgcataccgccagaatattcaggatggtgagcaggccgactatgcgccactggtcgttgtgccagatatcacgcaggtcttcacgcatggaggtatgggtggcaggcgcttcaacgcgctctttggtggtaaagaagcagaacgccagcatcaggaacgccaccaccgagagcgccgcgatacccccctggaagcccagcgccttattctcgccgccaatcagtttcaccagaggcatcatcagtacggtagaaagcattccgcccgccgttgccagcacaaagcgccaggattgcagggagatacgctgcgttgggtcattggttattacaccccccaacgcgcagtaagggatgttgaccacagtgtacagaagggtgagcaacgtgtaggtgatggcggcataaatcattttgccgttcagactgagatccggcgtgctataagccagcacacaaacgataccaaacggcaacgcgccaaacagcacccagggtcggaatttgccccagcgagagcgggtgcggtcggccagcaggcccatacaagggtcggagatggcatcaagcgcacgcgccagtaaaaacatggtgccaacaaaaccagcgggaatgccgaaaatatcggtatagaagaacatcatatataacatgacgttatcaaagatgatgtggctggcggcatcgcccataccatagccaatcttctccttaacggagagaatttcacttttcattacgcatccttaacgctcacaacgctcactaataccggttacagtttttgtaaaccttccctgcgagcgtgaatattccgttatttggttatcaaattacgattcttgttttctgtgatcagggtagcgtcaaaaagtgtgatgaaatgtaactaatggattttatgggggtttatatgaaaccgatcatggcagaaggaaagggaagttaaaaaagcacgggaggggatgtggaaacgccaggaagtagctataatgcgcgcgcctccatgtagcaatcgaggcgcggaagatcgtcgtctccggtgaggcggctggacttcaaatccagttggggccgccagcggtcccgggcaggttcgactcctgtgatcttccgccaacatccttctctcatgcccaccattcgtcctctatttcgggacaaagtatttgcttattattaagactagttcttgcatataatacgaaaggaaaggtggatagagaaagtggaatattattttattaatcaccatttaccgattgctaaaaccgaacgtccatttattgtgggatatcgtctgcaaagaagggataaaagtacgccaggactaacgcgggcgggacttaactaatcaccaaacgaacttgtgggtcatacttacaggctcatcctttctcaaaagagatacgcttaccaggccaaaattatgagatcaacgtatagagccatccggataaagatacatgcctccctccagatacacgggttctccttcttctaccgctaaattatgatatagcgattgcatttcatcatctgcactttcttccggttggttttcaactcgataataggtatctacatcatagttctgtttacggagatcgtcgtcgctgtatacgccaagccgtttttttaagcctgttatattaaatatccattttaacccatctttaatataataggcatcaccataagcattttcatcggggcattctttatagcccatccgcaatgcaacatcacagccatgcttaccaacatatttataactcatatcccccccaatatgttgcttcaatatcccagataaaattcataacgaaaacctatcctgataacctatgccacatgaaggatacaatttaaactaaagtacgcgttatattatcccctaagtccgtatcaagtatgcgtattctgtagtaggtagtaatatgttctaatttattaatgtgagttatatatgaagagattatttacagcgatgattatcgcttttattaccgtcacggcatcatccagtgcgcttgcctgcccaaagggtcaacatccacatgggggtacaggctcacatcataagggtggatggtgttcatacgagcagtaacgtcgcagcttactcatctacttgaaggcactatagccttacgtttatcaacgcaggcgctacgtttgtcgatgccgtaactttctgaagaaaaaacatgaacgagttggtatcgatcgcaaagaatatggttaccaacaacagtcaccttgtctccaggctgtcgatattctacggacacgacaggaaaggattttattaattccttagaaaaaccatgttaatcaacaggataaatagttaaaacgtgataaaaggcgtaacctttgcccgcttaaagcgggcaagattgcaggcaagagatgttattatactaaaacataaaaacaggtgaggctggtgtaatgagaatcgacaaactttcactgcttaactttcgttgcttcagacagctcgatattacttttgatgagcacattacgattctggttgcaccgaatggcgcgggcaagacgacagtgctggatgcgatacgcctggcgctgtttccctttattcgtggttttgatgccagcctctacgtaaaagataaatcgctggcgatccgtacagaagatgtacgtctggttttccgccccgaagcgctgaacatggaaatgtcgtctccggccatgattacggctaccggggaatgggaaagtggaaaaacggcaacctggatgctcgacaagcgaggagaacagccgccgcatgaagataagacagcggcgcagcttacccgttggggtgaacaacttcagacgctggtgcgtgaagagcataatttgcagcaggttgagcttcccctaatgctttatctggggactgctcgcttgtggtatcaggaacgttatgaggcacagcctactgaacagcgtctggataacagcgccttttcacgtttgtctggttatgacgattgcctttctgccacatcaaattataagcaatttgaacaatggtatagctggttatggcttagctaccgtgaacatcaaatcacacaacttgaatcaccttcagcaaagttaaaagaaggtgttcgtgttcagcggatgaaagaagctattcaagccatccagcaagccattaactgtctgacgcaggaagtgactggctggcacgatctggaatacagctccagccataaccagcaattggtgatgaaccatccacagcacggtaagattcccttatcccagctcagcgacggcctgcgtaatgcggttgcgatggtagcggatatcgcgtttcgctgtgtcaaactcaacccccatttacgcgatgaagccgccttaaaaacacaggggattgtgctgatcgatgaagtcgatatgttcctgcacccagcctggcagcagcaaattatccagtctttgcgcagcgcatttccactaatccagtttattgtcactacccatagcccgcaggttatcagcacggtaaaacgtgagtctgttcgcctacttgaacaggacgagaaaggtaatggtctggcgtcaataccagcggggcgacctacggcgagccaagtaatgatgtactgcacagcgtgatgggcgtcgatccgcaacctccggttaaggaacaggatgttttcgaacgtgggattatcaatgtatttaaggggttaagccaggagtacaaaaccaataatccttgttatttcggcaagaagattatcgtcaacaatctggtgaagcatgaccgatggggctacagcctgaactggggctggcgacgcgaccagctcgccgatctggaacgaatactctacctgctggatagtaaaaccattcctgacaaccggcatgatgtctctatccggtttatggacttcgtgcgcgataatccgcgtgagcaggtctttgaagacgatatgttcaccatccgctacttttagaagggcagcggacatatcacatttaagcgtctggatctggtggagaatatgaatgatatcgtggcgaagcattatccgggggcgctgcccgcaaaataaacgctatctgcgtaataagcttcaccaggaatttctggcatactaggcagattacggcattgcgagtcagatataagcggaggcggcatggcagacaaatacttaacccaatccccggcaggcgaatttgttatgtttgccagcgatgacggtgaagttcgtgtggagtgccgctttgagcaagagacgctatggctccctcaggcaaccatcgccaacctttatcagatcactccccaggcagttacacagcacattaaagcgatctatgaagaaggcgaacttgagcaaaacgcaacctgtaagtcttacttacaagttcaacaggaaggtagccgtcaggtaagccgcaacaggcttcactacagcctgcctgtcatccttgctgtcggctaccgcgttcgttccccgcgcggcacacagttccgccagtgggcaacccagacgctccagaaatacctgatcaaaggttttgtgatggacgatgagcgcctgaaaaatccgcccgtgggttcatcggctgtacccgactattttgatgagatgctggagcgtatccgcgatattcgcgccagcgaacgtcgggtttatttgcgggtacgagagatctttgcgttagccgccgactatcaaccatcgctcaaagaaaccacgcaattttttcaaaccatccagaacaagttgcattttgcctgtaccggacataccgctgctgaactcattcatcagcgtgctgacgccagccagccgcatatggggctgaccagctataaaggtgaagaggtacgtaaggatgacgtgacggtggcaaaaaattatctcactcaggatgaagtcagcgagcttaaccgcgtagttaacatgtggctggattttgccgaggatcaggcccgtcgtcgtcagcagatctttttacgcgactggcaggataagctggatcagttcctgcaatttaacgaccgtgaggttttacaaggcgcaggtaaagtcactaagaaaatggccgatgaaaaagcgcaggcggaatatagtcagtttgctgaacaacaacggcgcttaaaagaagccgaaggtgagaaggatatcgccggtttgctacaatgggaaacagaacctaaaaagtagctcagaatgccccgaaccccacaagcaaaatcatttgggggcacaatagtgggcaccagtaaaaatccaacaagataaaaatcaataaattcaacagaccaagatatcaaattagactcctgtgattgcatgataccgtcgtgaatatggcggttttatccaggcgtaaagactgtgggtagtaatatcaagacgtgttgcgacgctggaaacagaatggccgcgctcaataacctgttttaccgctttaattataaactcttcgggataacgtttaccgctcatgggctcctctctttaagctatcttaaatgactctgcggtgtctgttaaacctgtggcgattcatttaattttttgtacgtatcccacataatcgtgctattcacatttagagatcacgtcatcgatctgctaacgaaggaatctctatgtgtaaatcccgtctcactgagcatcagaacatcgccgtaattaagttggccgaagccggatgaatggttaaagatatctgccctgaggcggatatttgtgaagtgactgactatatctatggacattgggtttcaccacatcctgtttctcactaatgtgctccgggaaagagttttcatcagatgagcgattgaaaagagaagccagaagctgaagttgcttcgaccaataagtctgtcacttgctcagactgtcacgatcagaattaagtcagaccaacttattggcaaggtataactcccggcattaagttacaaaattttctcatggcattagcattacacctccttaaagtttacatgcgtctctataaaagagtcttaaatttgtatataagaagttgatgagagcacaaatttcaccattaagtcattgaataacaatgcaataaaagaaaaaatcttaaattaggttttaataataagaattcattacaggttgacaggaattacttttatatttcatcacatcaccccgatagtgacgaaggcagcagacagatggtattgagaaccgttatttatcaccctcatgatttagcaaatagtgctgttttaagattttttatgatattggagatactgtataaaaatctcaatgagtgaaatacgaatccgaaatgatgtattacgactgtcggatctgtcatggttccttaaagctgtattttaggtctttccaggagtttatgacactgacaatatttcgcgacttttgacagtcgtagtactttatattatctggattgacacatttatttaccaatgaaatattaatagaaacatcgacaggagtcgttcaggatgatgagaaagccttcacaaattgtccattgcattagttgcgatttatcctgtcaattatttcctgacagcgcagtacgggtgcaatactgtcataatgcggcattttccatctggccagatggtaatgctttcctgaaaaaagggtttattgaaaagttattgcttgatagacacaatcatttatccagcggttttatctttgttgatttttctttcccgaatcttcgacgatttaccgatttgcaatgggctgacagtctggcagacagtggcatgcatattgtcctgatttctgacagaagtttaactccgctggccaattactggattttgaaaagcaataaaatacaagggattatttattccgatgacgatgatattgtgcaacagcaaaagatgcaccgcttgtttaccggtcggctcgccaacagtaaacgtggacgaacgcttaactatacggaatttatattactgaagcgctttgtatcaggaataagtattcagcagattgtaaatattgacaatattgatattaagaaactttatgtgcataagctgcggcttgaaaataagctagggcatagcattcataaaataatatcaaatattttatagatccgtttccatttttattatttccatattattgcgatgtggaagacgctttacgccataatgcaggaggcagaatgccaactccccaaaattactcattcatcgccatagcggtatcagcagcattagcctctatggtatttccctcccaggcggcctgggttgacgttgatagtctgccatccagtgggctggtcagtcagttgccgccggaattacaggctattattcccgctcaggccagtaccggtttcaccaaagtcgggaccatgcccaactacgtttatcagtggaacaccggcaccatcccggtttatggcaatggcctcacgcttaatgggccgggcgcggaggcgtttgaacacactgtcacggttattcaaaacagcgggacgggaagtccgggcgtgatttttggcaacgacctgaccattcggacgcagtcggcgaatgccgcgaataatggtagagacgtcgatggcatccgtactcacggcgcgaatactccggataacccggtatttattattaccggtgaccgtacccgcatctacgtggatggtcaggatggtgacggtattaacgccggatataactcactgggccagggttggaccggatcggccaatatttacgtcggcgacgatctgtatatcaaaacgaccggtagccagggacgtggcattacagccaacgccatgcgggatgcgtcacgtgccaaaaatacgattgtcgtcggcaatcgtgcgcatattgttactaccggcgacagttcggaggggctgcgtaccggacaaagcggttcgttgattcgtctgggtgacgatgcaactatcgaaacatccggcgcatcctcaacggggatttacgcagcatcctcctccagaaccgagcttggcaacaacgctactattacggtgaacggtgccagcgcacacgcggtatatgcaactaacgctaccgttaatttgggagagaatgccactattagcgttaacagcgccagtaaggctgcatcctatagtaaagcccctgccggtttatacgccctctcccgaggcgccattaatctggcaggcggtgcggctattactatggcgggcgataacagtagcgaaagttacgccatcagcacggagactggcggcattgttgacggttcttcaggaggtcgtttcgtcatcgacggtgatattcgtgctgctggcgccaccgctgccagcggtacgctaccgcagcagaacagtacgattaagctcaatatgacggacaactcgcgatgggacggggcgtcgtacatcaccagcgctacggcgggcacaggcgttatctctgtacaaatgagcgatgcgacctggaatatgaccagcagctcaacgctcactgacctgacgctgaatagtggcgcaaccattaacttcagccatgaagatggcgaaccatggcaaacgctcaccatcaatgaagattatgtaggcaacggcggtaagctggtctttaatactgtgctcaacgatgatgattccgaaacggacaggctgcaggttctcggcaatacttcaggcaacacatttgttgcagtaaataatattggaggagccggggcgcaaaccattgaaggtattgaaattgttaacgttgctggcaattccaacggtactttcgaaaaagcaagccgtattgttgccggagcctatgactacaacgtggtgcagaaaggtaaaaactggtatctgaccagctacattgagccggacgaaccgattattcctgatccagtagaccctgttatccctgaccctgtcgttcccgatccggtggaccctgatccagtagacccggttatccctgaccctgtgattcccgatccggtggaccctgatccagtagaccctgagccagtagacccggtcatccctgatccgacaattcctgacatagggcaatctgacacaccgccgataacagaacatcagttccgtccggaagtgggcagctatcttgccaacaactatgcggcaaatacgctgttcatgacgcgtctccatgaccgtctgggtgaaacccagtacaccgacatgctgacgggtgagaagaaggtcaccagcctgtggatgcgtaacgtcggcgcccatactcgcttcaacgatggcagcgggcagctaaaaacccgcatcaacagctatgtgttacaactgggaggcgatctggcacagtggagcactgacggtcttgaccgttggcatattggtgcaatggcaggttatgccaacagccagaaccgcacgctgtcgtccgtgagtgactatcattcccgtggtcaagtcaccggttacagcgtcggcctttacggcacctggtatgctaacaatatcgatcggtctggggcttatgtggatacctggatgctgtacaactggtttgataacaaggtcatgggtcaggatcaggccgctgagaaatataaatccaaaggaattaccgcctcggttgaagccggttacagcttcaggttaggtgaaagcgcgcatcaaagctactggttgcagcccaaagcgcaggtggtatggatgggcgtgcaggctgacgacaatcgcgaagccaatggtaccctcgtcaaggatgataccgccggtaatctgctaacccgcatgggcgtaaaagcctatattaacggccacaatgctattgataacgataaatctcgagagttccagccattcgtggaagcgaactggatccataatacgcagcctgccagcgtgaagatggacgatgtcagcagcgatatgcgtggtacgaagaatattggagaactgaaagtgggtattgaaggacaagttaccccgcgcctgaacgtatggggtaacgtggcgcaacaggtgggtgacacaggttatagtgatacccaaggaatgctggggatgaaatacagtttctgattcaggtaacaacagagccgctgatcttcagcggcttttacccggaaacgctttcatttggctgataggtttcatgaacggctcccaaaaaagcttaatgcgtacagaaaaatatcgggcgtttcccgatggtgaacataaagccacgatggccctgagtcaggatggtgtaactgatacttttccctggatagacataaaaatcgggtaaaaccgtctcgataaccgcatcggacagtgtttcgtcacgcgtgactttgttgatatccgtcgatataaaatgggtgctgtctttattttcactccatacataggaaacatcacggcggatcacgccgctcattttattatcgacgtaatatgttccgctgatggaaaccaccccagtgcgttttttcagcgaatacataaaatccagcgtcaggttagcctgagtgttgttataaaacacaatcacaggcgccgtacatttctctggatcccggttcttttccgtatacaaatgaaaaagatgtccaagccctacacccagacacagtagcgtcaggcaggctaacatcagtgcctttttacccatgtgtcaccccgcggaaaaaaagcgtcacgcagcctgtatcaccgcgcgttttataaggttgctgacaaatcaatgccgtaaccgctggggtgcgactgctggaagggaaatagacccatgggtatttctgacaatccataccggtttttagaatcattgacttatagcttgcaaagcggctgccgctttcgatatcttcattccgcgagaaaaaatgacagccctgagttgtttcaaccagcgtgtagcgatcgtaaaaatccttatcgggaacggtttgccagcttatagtgccaagcaaaataccgacagcaaatgtcccggtcatccaaagtacaggtacataatgtttaaaccaacgccctgacatacgcggtggcgtctcaccctttttttctattgcctgagcgaagtctttgcggatggtcatgaggctcacacctggctcaatctgaaagcctctacgcggaaccgtgattatcagcgtatcttcattttcgccaacggtacgtaatccgcggcgaataatggagatattctgataaagcgtatttgccgacaccaccatgccgtcttcttcccacactttttgaaagaatgtttgttgtgagacgacggagggggcgttttccagcagaaggcgcaagcagcggctggcgggcgttgtcagaataatgttgagatctggcctcgataatgaagccaggcgattcatttctggattaaattcaatattatcgttaattatccataacatcgcattgttaccatgccaaaacataacgtagttggagagggttaatagacaccactgagtatagtctgatgctgtggctgcgtagcaggacatggattgtcccctgcacataccgatcatatagaagagcgagaggcataagacattaacaggtaagcgtagacaccgcttttctcattatagcagactcaggggtgaaagtacgtttggttttcttgttcgttaagtctcctgttttgtattgaggtgagaatatcacctttaatcaagtggccaaatttactgtgccactacgctttaatatcttatatataaatcatgagaaaaaatatcctgataatctaccccacatgaaagacaaggttttattcaatgtgttcctataatggcttgtaatatcccaaaaagcagcactcgttatatagggatagtttccaatttattaagagttacagtagccatacttaataaaagcacgcttcccacttaatatttaagctgtgctttatgttatttaaatataaataagttaatccttaaccaacatatttcaaatttataccaaataattttaaaactatctatcagaaacaatttgtaggggcatagtttgttttttcaatcaataatcctctctgacatgtaaaatagaaacatttattcataatatgaatattgttgtgataacaaattcgcgtgaaagtaaatcgactgaaggtgatgccgatgaatattccttcagaaagaactcaacaggttaatccagaatcggcaacggattactgtcatcagcttaaaaacggaaatcgccccggcgattaatgactttaacactgatagtgactatcagtgaaaggcaacaacaaggaatgaattatgtctacacccgcgaattttaacggtcaacgccctgccattgatgctaacgacgcagtaatgctgctgattgatcaccaaagtggcctgtttcagaccgtcggcgacatgccgatgccggaattacgcgcgcgcgccgcggcgctggctaagatcgccaccttatgcaatatgccggtcattactaccgcatccgtaccacagggaccgaatggtccgctgattccggaaatccatgcgaatgcgccccacgcgcaatatgtcgcgcgtaaaggggaaattaatgcctgggataatgccgattttgtacaagcggtaaaagcgacaggccgtaaaacgctgatcatcgctggcactattaccagtgtctgtatggcttttccagccatcagcgccgtcgcggaagggtacaaggtatttgcggtaattgatgcctccggtacgtacagtaaaatggcacaggaaattacgatggcccgcgtggtgcaggcgggcgtagtaccaatggataccgcggcggtagcctctgagctgcaacgtacctggaatcgggaagatgccgcagaatgggcggatgtatataccaaaatattcccggcttatcagctactgattgaaagttataccaaagcgcaggaagtagtaaaaaataatgaactgctggattctcaacgcgcataaataacgccctgaagaggctaaatagccccatttaatggggctattttacttgccattttggacctgggcagtgctcgccaaaacgcgttagcgttttgaacgccgcttgcggcggcccgaagggcgagcgtagcgagtcaaacctcacgtactacgtgtacgctccggtttttgcgcgctgtccgtgtccaaactggctgcgccaataacgcctggtgggataggctcttaatcaaatacgccattaataatcgccgtgaccaccgcggtactgagcgcgatcagcaccagattatccccaacgattttccactcatagcccggataataaggtaattgtcccagcatagacgccggcaccgtttttttagcgattcccggcggtagcggttttcctctcgccagatttttcgcaatccccggaggtaaagactgataacccgtcagccctaaattcactgccagttgcctggcgacagcatagctaatgtccgactcgacgtgatccggtttaccgccatttttacggtgttccgttttttgcccggcatttcctttatgtccgttaccgttattaccctgattagccgcgttattaccatgtccgccgccattaccatttcccggattcgccagcacaggcgtagcgctcagggaaaacgtaatcaacgtcgccaggacggcggttaaaccacgacgattattcatgatattgcccttctgatgtgggataccatgaaaatagcgccccgccataaaaagaacaactacatcgattcttattttaagcggggctcgccaacagcagcttatcgtatccagatagtcagtaaaatcaggatgattgctatcaggacaacctgataaaaaattttgtccaaccctcttttttgcatggcgtcacctcgttagaaaacgatttgccagagggctaaacacaacaccaacaggctaatcagtaaaaatatcagcgcgatgattttatcgggtgagcgattcatctgggcgatcctcaaacattattaaaaccactggccaaagcgtttgatataaaagcgcttcatgccttgcgccaccagacagtagctcaataatgtcgccaccaaccacgggaagtagctcagcggcagcggctccagtccaaccatcgcgcccagaggtgagaatggaatataaatgcctatcgccataatcaagccggtcgtcaataataccggcaacgtcgcccgactttggataaacggtattttctgcgtccttagcatatgcacaaccagtgtctgcgagagcagaccctcaataaaccagccggactgaaagagcgcctgcgcctctacgttattagccgcaaagacgtaccacatcagcgcaaaggttgtgatatcgaaaatagaagacgttgggccaatccatagcataaaacgaccaatatttttcgcgtcccatttccgcggcttacgcaggaactctttatccattttgtcccacggcaacgacaactgcgaaatgtcgtacatcaaattctggatcaacagatgaatcgccagcatcggcagaaacggaataaacgcgctggctaccagtaccgaaaaaacattgccgaaattagagctggcggtcatattcagatatttaatgatattgccaaaggtttcccgccctttgataacgccttcctcaagcaccatgagatctttttccagcagaataatatctgatgactctttagcaatatcggcggcgctatcgacggaaatccccacatccgcatcacgaagcgcgggcgcgtcgttgatcccatccccaagaaaaccaacggtatgaccatttttctgtagcgcttgcaaaatacgcgttttttgtaacggcgtcagccgggcgaatactgcgcgtttctccacctcagacgccagttcggcatctgacatcgcctcaacctgggttccggtcaggatatcgtgcgtatcaatacccacttccagacagatacgcgccgtcacaaccggattatcgccggtgaggactttgaccgccacgccgttatcccgcaacgcggcaatagcttttccggcgctttctttcggcggatcgagaaaagtgagcatcccttcgatggtaagttcggtctcatcctccacacttaatgtcggattgttcccggaaccatccagcttacgtgtcgctatcagcaatacacggaatccctgcgcattgtaatcttcggttttcgccagcagtagctcgcggcgtgtttccgtcagcgccaccacacgatcgccttcgcgaagatgggtggctaccatcatcatctcttcaacggcgcctttgcagatcaggcatctgtctccatgctgcgcatcctccaccaggaccgatacccggcgacgtacaaagtcgaatggcagttcatcgcgtttaatgaagcgcgcttttgtcgatggtgcgattcgaccctcgccaaaacgcagtatggcgcgatccatcacattccgggcgccgctctggctgctactattcagccaggccagcatcaatacccggctgctttttacaccgctcacatccagatgatgctccagaaaaatattgtcctgggttaaggtgccggttttatctgtacacagcacatccatcgcgccgaagttttgaatagcgttcaggcgcttgacgatcactttgcgccgcgacatcgcaatcgcgccttttgccaggttggaactgacaatcatgggcaacatttccggcgtcaaccccaccgcaactgccagcgcgaacagcgaagcctctacccagtctcccttactgaacccattgatcagcaggacaaccggcaccatgatcagcataaagcgtatcaacagccagctcacgctgttgactccgcgatcgaaagccgtctgggtacgcgtacccacaatggatttcgccagcgagccgaaccaggtacggcttcccgtcgcaaccacgaccgcttgcgctctgccgctggttacattggttcccatcagacagatattgcccaaatctagcaggcttttatctttatcaggcaattgctcgctgtctttacctgccacatcagccataacatcgtatttttctacgggtaatgattcaccactaagaattgactgactgataaagagatcgcgcgacgccagcagtcgaacgtcggcgggcaccagatcgcctgcggccagaaaaaccacatcgcccggcaccagttcttcaatgggaatctcttcctgcaccgcgcctatattgcccggcccacgacgcaacaccgtggcggtggtgcgaaccatctttttcagcgcctgtgctgctctgttagtgcgaaactcctgccagaaacgcaataacccgctcaaactgaccatcgtcagaataatcagcacaccagtgagatcggtctcttcgccacggcgtaacgggagccagtaatccgtgatgaaactaacccctgccaatgccatcagaacgtaaataaacgggttattgaatgcctgcagaagctgaatcagcgccggaggaacttgctcatgcgccacttcattgcgcccatacactttcaaccgttcgctggcctcttctatcgtgaggccctgacgatggctgttcagccgcgccagtgtctcctccgggctatgaaaagcttccgcttcgatcggaaatacttttttatgctgcttatcattttctgacgccgggcgattgagtttccggttttcaatgttcatgtcagtcatgatgaatccccaaaattaaggtgtagtgtttcctgcatatcacgcccggggaatagtaaactcacgattagaaggtgaatgccccgggagaattatctatgcataaaaaaggttattgcttactcactattttgagtgggttttattttatcgactcgggaatatccatcattccctccttatacgcctggcgtaatgttgcaattgaataaaaaactattattgactatcaatgctccagtgaattgcggtgatattatcgttatcacctattctggatataatcagctctcgcgttttacgataatcagcatgacccacgagctcggcacgaatttctttatagccctgttcctgagcggggaccgaacctaacccttgtaaacagatcgcggcctcttttacgatattcagtaaccactgacgaaccgcgctctcatcttctttattacaggttactttcaggatataacgtttttctccctcagcggatattgggagttgatttatacgctgcgccgcttcacgcaataaaatattggcgcaaagaataatgatcgtcgccgccagcgcatttttgaactgccctaagccgcataacacgccgatgcccgccgaacaccatagcgttgccgcagtgttcagcccgcgcacattcatcccttcgcgcatgatgacgcccgcccccagaaagccaatcccagagacaatctgcgccgcaattcgcccggggctgtctggcgatgtcgtcatggagctcagaataaaaacggcggcgcctgtcgccaccagcgcattagtgcgtaatcccgccatacgttgacgccattgtctttccgcgccaatcagcgcgcccaacagcatagcggccagtaaatttaaaatataaggaaacattaacatacgttcctccattttttctggaagaataagtacgtgctatatttagcacacgacaaatttctgccctgaggcaattagcgtcgtgttaacggcggaggaaataaagcgtgtttaaacatgaacatgacgattacctcgcgacaatgcgcgtgttgtaacattattgggatgacaatcgtcacaaggggagattgctgcccaccggttcggcaagcagcgcaggaatagcgtgcgttaacttgccagatgatttacgtaaaagtgactgtccaacatattactcctgcatgaatttgcgcttattatagtcagccaatatgttccgtaaagtgcaaaggcgggtttagtgacgttctgtttaagtttgtttgatattttttcttatgacaaaaaaatgacaatattatgtcgataacaagctcgtctgaaatcattaaacaataaattcctgcttaataccggcgatagctctgttatgatgcctgcacgtaaaaaaataaaacaacatgacgaggaaaaaatgggttccaccagaaaagggatgctaaacgtcctgattgccgccgtattgtgggggagttcaggcgtttgcgcgcagtacatcatggagcaaagccgtatgtcgtcacagttcctgacgatgatacgtttgttattcgccgggctgatactggtgaccttctcctttatgcacggcgataagatattttcaattcttaaaaaccgcaaagatgccctgagtctgctgattttctccgtggtgggcgcgctcaccgttcagctaaccttcctgctcacgattgaaaaatccaatgccgccaccgcgacagtgctgcaatttttatcgccgaccattattgtagcgtggtttgcattagcgcgaagaacacgaccaggcattctggtcttaaccgccattcttacatcgcttatcggcacctttttactggtgactcacggcaatccaacatcgctgtcgatctcttcagccgcgctgttctggggtatcgcctccgcatttgccgccgccttttatacgacctggccttccaggctaatcgcccaatacggcacactgccagtggtcggctggagtatgtcctttggcggccttattctgctgcccttctacgctaaagaaggaacgcactttgcggtgagcggcagcctgattctggcctttttctacctggtggtgatcggtacatcgctgacgttcagcctgtatttgaaaggcgcgcaactgattggtggccccaaagccagcattttaagctgcgcggaaccgttaagcagcgccctgctgtcgctactgctgttggggattagttttaccttgccggactggctgggcacgctgctcattctctcgtcagtgattctgatctccctcgattcccgtcgacgcgcgcgggccgcttaacgccgttgataatcacgatgaccgggcggaagagggaaaagtttaatggcgctttgccttaatctcttcgtcagaaagcccggtaatcatcagcaccatctctcgctcgatcccctgttccagcatcgtatgcgcaatacgcaaggcttcctcctgcttaccttgatgtataccttgctgtatgccttgttgcacgccttcacgcttaccttttctgcgccccgattcacgtattctgtctacgatcgtcattaatctctccttgtgttggggaacacggcgcgccacctcgcggataaacttgccaaaacgaggcgtgctgccatgctgtattagcaaataattaaacagcgcttttagctgactgtcattagcgtttcccgtaatcagaagtaccgctaagcgctcgaccaatcccatcaggtcgcgttgacgtatatgcttttgtaccagttccagcatcgcgatacgtcgatgctgcataatctcgttatccggcaccaccgtaatgtctaccagtggaaatgccgtcgcataaagctgacgcgccagcgcaggatcgtcaaactcatccagccagcaaagcgaaaagggatacgggcttttcgcgccatggtaaaacagcatgggaatcaccagcggtaacgttttatggccagcatccagatggcgctgcatcgcggcagtggcgtaacgcattaaccggaacgccatatgcgcgtccggcgtactctgatgctctataacgacatagatataaccgtcgccttcacacgtttttagcgaccaaaggacatcggaataaaacgcgcgtaaatttttctcgataaaactgtccggcgccagtttcaacgtcgtcagatcgcaacgtattcttagcgaatggggaagatgaatattgagaaaatcccgcgcggtatccggatggcgtaaaaacgttttgaataccgcatcatgaggcgtggacgtggggctttttttcatggcgatccgtcacctgaggaataagatgacgccactgtactcgccaaaaatacagacagcattcaggaaaatttacccctgcgaggaggctcgaaagggaatcactgacggctgcaatacgtacatttttgcccagcctgctacgcattatcgcccgatagcgtaacgctaaccgggcctacaaatacacgtcatctgtaggccaggtaaacgcagcgctcttcggcgataaatctcacaccagcgctttgactatctccatcaaccgaatgatgtcttcggggcgcgtattgccggtttgcggatcgataatcgagctgtaaacatgcggcatgacgcgcggcacgcctgcttccaggcaggtttgcaggataataccgaaattatccagtgagataccgccggtcggctcgataagcgtcatgccgtggcgggcagcggttgtcgccagcgcatataattccggtaacgacttttcgccgcccatcgggaaaaacttcgccgcatgtgcgcccatatcctgcatcatgcgtaccgccgcttcacaggaaacgcgggctggcgttccctggctgctgctgacgccggtagaaatcaccacctcgccaggcgttcccgtcgggctgaccagggcgttgatatgcgtttgctcgccgcccgtcgccgccagcgcgcccgccgcgaagccgctgccggtaaaggtctggttgacatgggccgggtgagtatgggcggcaatcatcgccgctttgtagtactgcgccgggtcgcctgcgcccagacccactgagatagacggcacctccgccatccagcgtttcacctccggcacgccctcttctaccgtagcgaactgcgcggaaagtacgccaatgaccgcatggccttcggcggcttcatagatagccttcgcgttggcgatatcctttgccagcacgttaatcgctacccgctgacgataaaaattaatctgctgcatgttctgcaatctccctgagtcgcgccacaatcaatgccatttccccttcggctaccgtgcgtggatcgaggctaaaaaccccctgatgaagctgatatttgcgggcgtaaatcgctatctcgccgccgcgcagctgcgcttcgacgtcctgcgcgttcagccccaattcagatgcgttcacccgcacacgaatacgccagattgcacgcccggcctcatcctgttcgatatcggcataaagtccatggatggcggaaatcgcttccgcgaccggctgtaactgtgctgcggtcacggtcgtctggccctggtggtaattctccagcgcatacaccagcccaaccatgttttccttgccgattttcattgctctggcaatcccctggtgctgcgctttgcaggcggcaatccacgttttcctaccagtgataaagccggaggttggcgcattaaaggctttcgcgccgctatagataaccatatccgcgccgctcgccacccagccgcgcaaatcctcttccgccgcggcatcgacaatcaacggcaggtggttggcctgcgccacctgtacaaaatcgtcaatgctcaacatgcctttctgtacgcaatggtgtgatttcacatacagtagcgcggcggtcttttcgttaatggcgctttccagttgccagcgggtcgccagattgctcgaccccacttccactatgcgcccgccgccaagacgaatggcgctggtgactggcgcgccgtagtccacattatgcccgcgcagcatcactacctcattggccataccgctactgtccggcatcagggcgacgcgcgcccgatcgccgtgggtgatagcggcagcgacggcaatggcaatacccgccgaggcgcacgaggtgatatagctatcttcagcacccgtatagcgcgataccagttcgccggttttttccaccagcgcgtcaatctcgacgaaagcggaagccgcgcgcgcggtggcctgcatgacctccggcgcgacgcttgagacgcccagaatggtcattttgccgcaggcgttaatgacctttttcaaccccagttgttgatagatattcggcgtcatgatttacagcactcccaacaacgaacagactatgctcagtgcgacaatcgacagcaaaatggtggtgtagcgcggccctttttttaccagatagaagtagatggcgaataccgccgccagtggcagtaagcccggcgcgatagagtcgaggatctgctgaaccaccacttcagatcctttcaaggcgctaatttttaacggcgtggtgattttgacgtagctggcggaaagcgcgcccatcatgatcaaacccagcacgttggccccgtagatcagttctttgattcgccccccttgcagcaggccgataatcgaatcacgccccagcgtatatcccttgtggaccataccgtagctgatcgccagggtgatcgccgggtagagaatcagcgggataataccgcccatcgcgctgccatttgccgcgaacggaataaagatcgctatcaacagcggcatcaccgccgcccagataatcgagtcgcccatcccggcaagcggccccatcaggcccgttttaatgccggtgatagacgagtcgttaatcggctcgccgcgcgttttttgttcttccatggcaatagagatgccctgaatcaccgcgccgaaggtctgctcggagttaaagaagttaaggtggcgttttagcgcttctacctgctcctctttttgtgggtaaagttttttgatgatcggcgtcatcgaggcgcagaaaatcaggctttgtaagcgctcataggagctggaaacctcggcgcccagccagtagataaaccaggctttggtgatatctgctttggtcagcgccccgctttcccgcgcgcgctcaaccagttcatgttgcattacgtcactgctcatcatgctgctccttcatttttcgccaggcctttaatcaggaaggcgacacaggtgccgaagatggccatcgccatgatgtcgaccttgaggtacaacaccgcgaagaacccgccgataaaccacggcaacaggctctttttaccgatcaccataatggtgatggcaaagcccagcgccggcagaatgccgcccatgatttcaaaggagtgggttaaccagtgcggcatcagtttaaggaaactttccaccacatcctggccaaagtagttagcggcaaaaaccaccgggaagcgcagcaccagccccagcaatgccgggtaaagaaaggcgcaacgcatgatgcccgccatgtttgccgtttccgcgtgtttatccgccatatgcacccaggcagcattcagcgtgcgcctaagctgatcgagaaacacgccaatcacgccaaacgggattgccagcgcgatcgccaggtttgggtccataccggccttcaccgcgataggaatggagatacaggccgccagcgccgggtccgacggcacgttgccgcccggcgttgaggtcacgcccaaataaacgagctgcatccctgcgccgatgatcatcgcagtctgcatattgccaagcaaaagcccgacaaataccgcgatcaccaccggttgtaacagcatcgcggagaaggtgtagccgaggcgtaaacgggcaaaccagtaatacaaccccatcaggcttgcaaagagtaaggtatccatagtgttatcctatacacttcatccttcaggctgcctctttgttggctgccttcgctcaccccagtcacttactttagtaagctccaggggattcactcagttgccgccttgatgcatccagaatgattttgtgtctattaaagggttagaattttttcaggatatcgtcgagcggctgcggcttatcttccggaatggtctggaaaaatacctgaacgccacggtttttcaggtcgttaagaatgccgacgtctttttcatccagcgtaatattctgaaaaaccgccttgcggtttggcccgccgccgagaccgccaacctgaatgcgggtgacgtcaaagcccagttgtatggcgtcctgcaccgccgccagtgacggaaaaagcaccagcacgttaccgtcgccaagctgattttctttccatgcagcggcaaaactctggttgccgaagcaatccactttgatatttggcggcgccgccatcaggtagatatttttcataaacggatcggcgtccagttcatcactcacaacggctatccggttcgcctgagattgtccgacccacttcgtgacaacctgtccatgaatgagacggctgtcgatgcggcataaaacgatattggccatgatgttttccttagagtgattgttgtagctgacgtacatgggcgaccacatccaggcagctactgcgcccggcctcaactaactcgtccacgcaggcggttagcatcccttgttcgcgcctgtccagcgcctccagcagtagcgacgcattcagtccggcaatcaccgccaccggataatcggcgcttagccgcgccgcgacgttggacgttgtgccgccgacaaaatccgtcaggatcagcgagccttccggcagcgttttcaccacggcctcgacgcgttgataaaactcgcccagcgtatcgacaggcattagcgcgatttccgtcacgcctttaatttcgcccgtgaccatacgcaggctgttgcaaagcggttgtccccagccgccatgcgtcagcagcaggatgtggggcaacggttgtgtggtagtcaaaatggcctcctggcgcaattacatgaggacaccggcatatattgcccggtggcactgcgcttaccgggcctacaggacactcccggtaggccggataaggcgtttacgccgctatccggcataacgcatcatcagaagagcaaaggttgtgccagaatttgtgtcacgcgaggaagaagaaaggtctggcgaggcgcgaagccccgccagtaaaaggattaactatagagcagttcgtagatataaaaatattccgcatccgataaacggatggcgtaggcgtcttcgatcggcagaaaagcggatttgatgacactaaacgcgcgcgcgtccagattcggctgactttccaacgccatctgtaacggttttcggttaatcacaatacgctctaccatacagcagcagtggatcaggaagcgcagtgtcacctggcggcttggtttcagggaaagcgaagacgtcagatggttaaaaacgccctccatctctttcagaatacgctgcgggttaagcacggaaatatggttgatgatactctccatcgttagcgcgctgataaagcgcatggcgctgcgctccatctccagacggcgttcagcgttggacagatcgggcgttaacaggctcaacaccagttccggcccttgttcggagaaaagctcttccagcgaaataaacggaatatccggcagccccggctggaaagtgccgacaatccccgccagccgctcgctggcattcaatgcctgctgaacgcgctccagacttcgtacctcgttataatcaaggatcaccatcctggtgtcctgcgacatcagttcgccaaagctctcctccagcacctttttgattttttccgccgttcccatgccagtaatacaggagatgaccagcactttgccgccgttctcctgctgcggcgtacaaagctggcaggggatatttttactctgcaggagcgccgtcaactgtggtaagtcgctggtttcatagcttaaatccagcccgacttccagcagactggtcagcgtgatgttcggcatgagcaaaacatctatctggaataacttactgatcgtactgccgaaatggatcaatgagccgatgtccaccaacaggataagccgccgatattggcgggtttgaatcatttgggtcagcgtttccagcgtgtcatgcaccgactgttcaaacggcatgtcgatggcgctgaacagctcgcgctccagcacgcggttgacatattgcgcctgactggtggcggtggtcgcgccgtgggcgattaaaataaccccgcagtcggggctggcatcgatacgctgacgataatggcggcactctttcaggaacaggcatagccagaccacttccgtcgccggacactgaatatgcagcagttcgttgattttccgacacagcagcgtggcgttgtcatattcgtctttgcagcgatccaggatcaaactggaagagtaaagctgcgggatcaggccgcgctgcacgtagcctatcagcgccaggaagtgtttacgcagtgggttaaccagattttccggcagcgaaaagcccaacacctgctctacgcagccaatcagcagcgtcacgcgctcttcaatctggtcgccatagcgcggcggatgcgccacgctgtcacggctgtagagaccgtattcaaaaatcgagctgagtttatttttcaggatcgccagcgtctccgccggggggacgttactgttgcgcaaattaacatactcgcgcgtcaggaagctgtaaaagaggtcgctctcttcaatttccgccccggtcgccagcgacgtcttcaatgcgggcagcgtgcgcgcgtctatatttagccgcgctttaccctcaaacagagtatccaccaatagacgctgttccggcgtcgggttaaccgacatttccgccagccgcttatccagctgtagcgtgtcgttatgctcggtcattcccgatgcccacgcctgagcgcagagaaactgaatatcgcttttaagctgaccgatattgccttccaggggtttattcagcaaccagagtaacaacggtttatcaatgctgaccgtgcgttctattttgcggctttcccgctgtaagaaccccacgatcagttcgatctgttcttcaacggagcgctggcgaatgcccggcaaatcaatgcatacctgaatacgccgctggaaagtacgtaacagcgccgacccgaccggctcggtagtggcgcaaatcaggcgtaccgaaattgatcgcggctggctgctcacgccgagcggacggtactcgcctttatccagaatagagaacagcttttcctgcccttcataagacagacggtgcacctcgtccaacagcagataaccaccgtccgcctgctccacgaggcctgttttatgttcattcgcgccggtaaacgccccctgccgatgaccaaacagatgcgaggagagcagttccgggttatgggcgtattccgcgcagttaaagtagaccagcggcgggatagcgccgctcgcctgttcacaggcgaaacggtgcatcagttccgcaaaaaaggttttaccgacgccggacggcccggtaagcagaacgtgtaaaccgtgcggatagagcaccgccgcacggcctttttctaccgcatcgcgcaggctgcgatcgtaaccaatcaggctggtaaacggatcgtcgggcgcgtaatgctcttcatgcggcagcacatccgccaccgaccgcacctcgcgttcagactcttccagctgtcgtcccagcaacgtttccagcgcctggcgatgcagaaaatagaccgggcggccacggcttttgattgccaggccgtcattccataactgattgagatctttgctgacggagttacgcgccagcccaagattgaaacctatcgcctccgccgtaaacgccgtctcctgcgccaaatcggcaagacatagcccgcgcgtcagccgttccagctctcccagtacgatctcaatacgtctcattacactaccgcttacgaaataaaagagtagtcagaacatacactattctgccacgcaagaaagtgaaggcgcagcgagaaaccgccttcccacttttgcctgacttcaacgccaacggatagcacgccccgatgagtgaacgtcgcacggtctacacttactcttgaaaaagtgcaaaccgataaggataccgtttatgaaacgaaaaacgcttctgcttattgccacacttgtcgcgctaccgggcgtcacgtatgccgactctccgtttagctcactccagtcggcgcatgaaaaaaatacgattttaaaggatttgcgcaaaatgtgtacgcccaaaggcgcgctaaccgatgaagcctgggagaaaaaaatcatggcgagcgaggggaaccagcagcatattcgggaggcgatgatcgcgatagagcgcaacaatcagcataactactggcaggctctcggcaaggtggaatgcccggagatgtagcacagcttttccgctttttggtcgcgaaaatgcggactgtaaccggtttctgttcgctaaaagcgcgtattctggagcgaatttacgcgatcaaggagtacgacaatgcgataccgttttcccgataacttctggtggggcagcgcctgctcagcgttgcaaaccgaaggggatagtctgaatggcggtaaaagccagaccacgtgggatgtgtggttcgagcgccagccgggtcgttttcaccagggcgtcggtccagcggaaacctcaacgttctatcgccactggaagcaagacatcgcgctactgaaacagttaaaacataacagttttcgcacctcgctaagctgggcgcggctcattccagacggcgtaggcgaggtgaatccacaagcggtgagcttctacaatcacgtcatcgacgagctactggcgcagggcatcacgccgtttattacgctgttccattttgatatgccgatggtcatgcaggagaaaggcggctgggaaaatcgcgacgtcgtagaggcgtttggtcggtacgcgcaaacgtgttttaccttgtttggcgaccgcgtgaagcactggtttacctttaacgagccgattgtgccggtggaaggcggctatttgtacgacttccactatcccaatgtggtggattttaaacgggcggccaccgtggcgtaccataccgtgctggcgcactcgaccgccgtgcgcgcctggcgcgccgggcgctacgacggtgaaatcggcatagtactgaatctgacgccgtcctacccacgctcgcagcatcccgccgatgtgcaagccgcgcaccatgcggatctgttattcaaccgcagttttcttgacccggtattaaagggagaatacccggcggacttggtggcgctgctgaaaacctatgaccagttgcctgcctgtcagccaggcgaccgtcagcttattgccgacggcaaaatcgatttactggggattaactattatcagccgcgccgcgtgaaatgccgtgatacggcggtgaatccgcaagcgccgtttatgccggagtggttatttgactattacgacatgccggggcgcaagatgaacccttaccgcggctgggaaatttacgcgccaggaatttacgacatcatcaccaacctgcgggataattacggcaatccgcgctgttttatctccgaaaacgggatgggcgttgagaacgagcagcgttttgtgcaagcgggacagattcacgatgattaccggattgactttatttctgagcatcttaaatggctgcataaaggcattagcgagggctgtcactgtcttggctaccacatgtggacctttatcgataactggtcatggctgaacggctataaaaatcgctatggttttgtacaactggatttagccacccaaacgcgcacggtgaaaaaaagcggagaatggtttgccgccaccgcagagcataacggttttgattaagcatttattattgccggatgacgactaacgtcgtatccggcctacaaatggcagcaatatcaactcattggcgtaatacggactttcgccgccacgactaacgccgtcaacagcatcaggccgccggaaagcgccagcggcgaaagcagcccgaaattgtcgagcgcataaccgcccaccgccgcgccacaggtatttgccagttgaatcaccgcgacctggatggaaccggctttttccgcctgatcggcaagagaacgagtgatccacgttgaccatcccaccggcaccagcgcaaacgccagcccccagataatcgctattgccgccgccacggttttgtcgcttccccacacaatgagcgtcagcgcgctcagcgccagtagcagcggcgcaccggccagcgccagttttaccgaacgtttcaggacataggatgagaaagaagtgccaacgaagctggcaataccaaaacttagcaacaccagcgtcagaccatcaacgtcaaagcccgccagattcatatagaccgggcgaatataggtaaagaaagcgaactgcccggcaaaagacataaagatggcgatcatcccggccatcacgccagggcgttgcaacaggctaaacatattctgtttctggtgagaaggttcgcccggcagcgacggcagtgatttcaccacccagatgacgcacagtacgcccatcaccgcagcggcgttaaagacattacgccagccaataataccgcccaaaaagctgcccagcggcgcggcgatcactaacgcgatggagacagcgccaaaaatcaccgacagcgctttcggcacggtacgcgcgggaaccagtcgcatggtcagcgacgccgacatcgcccagaatccgcccagcgccaacccaagacaggcgcggcccagcaatagcagcgtaaagctgttggcaaaggagaccatcagacaagaagccgtcagcaaaacggcgaacagaataacgatataacgcctgtcggtcgcctgaataatctgggtaatgaacaggctggaaaacatcgcgacaaacgccgtaacggtgaccgactgaccggcgacgccctcggagatccccagatcctgcgccatcggcgtcaacagactaacgggcaaaaactcaacggtaatcaggcaggcgacacaaaacgccacggcaaaaacggctgaccagttaggcctggcaaccccatcagcgcggaatttttctgcgatattttcattcattgtggttacctgcgtcgttttagtgcggaaaatccacgcagtgtaacattacaaaatgtgatctgattaacgttttagcaactgacattgttgcgctgcattttgcgaggctggtcgagagttgagaattatcttctctcgctgcgtgtaaaaccaaaaggtaagacatagtgtatcacctggtgctatactttagattacaggatgtcaacctgatgcgaaccttcaaaaccaggtggtttaacagagaagcgaagccccacacgataaaagatgacgagttaagcgaggccatcaacgccgtactgcaaggaaaagcagataatcttggcggcggggtttataaaaaacgtctcaatcaaaatcgcgatcgcgcaatcgtgttggcaaagggaggcgaacattggttttacaccttcctgtatgccaaacaggatatggccaacattagctatcgcgaactcgcgggtttccgtgagttagcaaaacactatgcttgcctgaccgaagatcagataacggcactcattaataacaaagaactggtagaggtgcgccatgtcagcaaaaactaaattcaaaagccctgcctttgaaccgattcatagcgcggcatctggattatttagcgtggatgccattccccaggagacaatgcgcagttttgacacggcctgcttaagcagcatcaaagacctgcagccacttgaaataaaagcgttacgagaaaaactcaacgttagccagccggttttcgctcggtacctgaataccagcgtatcaacggttcaaaagtgggaaagcggcgccaagcgtcccagcgggatgtcactgaaactacttaatgttgtccaaaaacacgggctaaaggtgctggtatgagggttttaccgatggtctgttaaggctattcatacgatcatgagtgcaggaagcctctacaacttcctgcgctgtttgacgggaattgcactatactgactcaccaaagccatcagcaaatgcagattttaattcatccataaaagccagttcatcctgtccatcacaaattaaatcaatcattgtgtttccctttacgccagcccccaaaatactcatcattcctttaatgggaatttctttgtcattattaactagcgttaatgaagactggtattttttgacaattttcgcaagcgtagcggctggccgcgcatgaagccccgtactgttcataacgcgtactttttgtctaatcatatattttccttaagagactttgcggaatgctgagtgatttttattcatcatcttaattttagaataaacatcatcctcaactgcctgttttgcgttcgccatgacacgcgccagattagcctcgttgttattatttacccaagccttaccaacagtagtaataaaggctttgcgcaaatcactcgcaatattcactttggctactttgtaattaacaaagctgcgaagaatatccgcgtcaataccagaacctccatgaataaccaaaggtaccggactgacagacgcgatgcgttgtaatagcgggatatcaatgcgtgggatatcttcaagaccatgtacattaccaattgacactgccagcatgtcgcaccctgtctcctcaacaaagcgctgaaccttctcaggttcagttttgcagtcagcctcgctgacatgatcatcttccttacccagaatagcgcctaattccgcttcgacgggaacaccaaatgatttacagaaatcgacagcttctcgggtaaatgcaatattttcttcgagcggtagcgccgcgccatcaatcattactgaggtaaatccggcccggacagcctgcttaacatcttccagagttttcccatgatccagatgcaggctgacaggaatatccattttatcggcatgtcgcttaactatttcataaatgtaatcgtaacctgaaagctgtgcattagtaggagcaatttgaataaaattgggcaatccggaacgttctattgcattaagaatggaaattgttgtctccaggttcgttgtattaaatgcccccgcaaggacatgtttttcctgaatacaattgagcaggatcctaccattgactaaaggcatattaactccagatatttatgtgagcagtgtaagtaaattatcgaactattgagttatcacagttattcaccaataagcgccccttcttgccgcagtttaaattggtaaaatgacagccattgctgctgatatattttcaactttgcagaacgaaccgcgtcaggaaaatatcgctcagccacaggaacagtcggggggacaacattcggacaggctatcaacaatgctccaagggagacggtttcatcaaaagcaatggcctcaattggacactggaggatgtcagccttcaactggagccagtatgggtttttcaccgcagggccaatgacttttactgtcctgcccgccgggatattaaagcacccgtgacagtgtgcaaactccatcgccaggccaataaagacactctcaagcagagactccggaggaagtgaatccgtcagaccaaaaagcaggccacgagtgtgccgatttttatttggcgaacccgagccccgcaaatgaggaataaataccggcacatgctcgacagaccaggaaggtttgaggtactgctccatgactttttccaggcctgtgcttatttccttatcagttaaacgaaaggtttttttcacccattcaagcgcataaccgccgacaggcagagaagcgaaaagcgtgaaaaattcaccatcggagtaacaaccatttgccagcttattcctgcgagcctgcacatcaagcgttggctgtgtattcagcagtaaaataccctctgtcgtgccggtagaattcagcacatcgcccggttgcatctgtaatgcgcgggcaccgaccatatgatcgtgtccagcgagggtgacttttacctcatgagagaagcccaattcctctctaagcgttgccgtcatccatccggccacttcacctggctttatcaacggagccagtacaccgaacggtatgccgagaatcccggcagcattacgagaccaggtacggcgagcaatgtccagacacaacgttctactggccagggatatttccgtctttttcgcacctgtcattctccacaacaacacttctggtgcatgtaaccagcagatatcttttctttcatgcaaggaatagttatcaagcaaccatctcattttaaatgctgagtaattactgtgaggtggcaatcccgttatagaatacagttcttcagcctctgccttgcttaatgacgagagataagattcaccacgtcgatcataccaggccagcatcggggtaagaatgacgccctccttatccacaaagacgccagactcaccgaaactcgcaatactgatattttttaccggaaacggtactgaagccaccagttcagccattaccagtcgcagtgcctgccacagcgcttcgatatcgaaatctacctcgcctttgtccgacgatattgttggcgtcggaaacttgcggacttccagaactgacacgtcatgacaggaataacagctgactttgcagttagttgtgccaatgtcaatgacaagcgctgcgtggtaatcaggcatagaccgttccttttgtcaggcgaaaaacaccataaataatcagcgcaagcacaggaatcagcccgatagcaataatatttccgttgaatatttcaagcagccagaaacggaaggggttaccgccatcaaggaagcttgatacctgaccacttgacccctcagccattttgaaattgacatctttagccataccggtaataaatggcgcaattttggtcgcaatccacaagtcggcgacaataacaggaattgcggttatcacagcccggaaaatattgccacgacatgccagtacaatcatggaagccatgactgccaggttcgcaaggtctccgagtggcaggactttattgccaggaagaaggaatgcaataaagacagagataggtgtcagaatcagtgctgtagatataatggctgggttacctactgctaccgcgatatccagtccgataaagagatcatcacggccaggatatttggcattcaaatatttcttaatggcttcagacagaggtaataaaccttccatcaaaattcgtaccatacgcggaagaatgaacatgacaccgccaatgctgatccccagcaacaggatatgtttaaagtcatatccggcaatgatgcccaacaagacccccagaatagtacccaccatcataggctcgccgaagattcccatttttttctgaacgttttccggatcaatatgaatacggttaacgcctgggatcttgtcgataattttatcgaacagcaatccaatcggaaagaagacgacagatgacagggtcggaagtgaaataccttccagaccgaagtactttgccactaatggcgctgaccagtccgccagtttgagaaccacgatcgcggcaatagcggctgcggacaaacccaaaacaaaactccctgtgctgtagtaaaccagcgttccagccagggcaaagtgccagtagttccacatgtcgacatcaacagtacgtgtcttattcagggccagcatggcgacattaatcagcatcgtcagcggaatgacaaagggtgcgattggtgagccccaggtaattgcggccaatggtggccagcctaaatcgacaacaggaaggctaataccagttcgctcaaccattgcctgtgcagccgggcctacgttgctggtaagtatgtcaaagatggcataaattccgacaaaccctattccgacaattaacgatgagcgaagtgctttagcgggttttactttgaagaacaatgccaggaaaaaaaggaccagcggcaataaaaccgttgggccaaaccccaggacatattgcacaacggtatagagagtatgtgctatatcattcatatccgacctcttattcagatgtgaccagacctcgcgttagcgcctggataatttatctgttttttatttatgaaatcaggcttggcctttaaggattgaaactattttttcaagaactttatcttcacctactccggtaatgattggcaggccactaacaaccggaatatccagttcataaggaactttcgttgttgatacaaccaaagctgcaccatcggtattgtttggcaatgaggctacattagtttgtgaataattaacatcaagcccattatctttacaatattccattactttttctgccacagccgtggaagtagcaacacccgttgcgcaaacaaatagtatcattttactcatacttcacctctttcagatatgcgtgtgtaaattgactgataaatttcatcatcattcatgaccagtaactgctgcataaaatcctcatcctggatcacatccataatccaacccagtacgttgagctgcttattgctttcacctaaagcaagcataaacaccaccctgacaggtacgggatctggttccccgcccatatcttcgaaattgacgggttctgccagtattccaacactaatggcgttttggcgaacatacttgtgatcagtatgtggaatagcgacgcctacaggctcaaccggtagacccgttggaaaattctgttctcgcgtaatgacgtgatcggcaaaatcagatacaaccataccatcgttaattaacggactggcaagagccttgattatgtcattctgactcacctctttagggaggtgtcgaacataatgacggcgaaaatgaatatcctgcatagattcctctttgctagtcaggcatccaggcgctgtaaaatagtgccaagataatatttattaccttttaaccagacgttaccaaaatcaatggccaatcctctagagaaaaataccaactgttccaaatgcaaaacaggtgcgtcttcaccaatatcaagataatggcctcgctcattaccaattaatttggctgcgtaacggctttcagaaaaacttattttcttatcagataatctttctattgctgaaaataaattctccctggtaaaatctacatcaataataccggggcagagatcaatgttgatacgattttcaatcaacatgactttttcatcgccaatacaacgaaggcgtttaagaaataaaacatcttgtcccggtttgatactcagtttctctgctacaaagcggttagcgggttccagtcgggaggttatgacactggttgtgaagtttatcttctggctggctaaggcttcagcaaaggagagcaaaccttcacccagtgggtaagcaacattttccttctttacgaaagttcctttaccctgcacttgcacaagaacaccttcccggacaagttggtcaaccgcttttttaacggtaccgcgactcacctccagcatatccatgatttgaaactctgaaggtatccggtcatcctcaactaattctccgctataaatactttcccttatccactccacaacctgttgatacagtgggatgtgtgaacttttactcaatgttttcatggtgcgcgcctaaacatttagagttgtctatagacaatcatgtacaacttcgagtttatgataagaaattttgagacaggaggtatggcaaggagtcacagttttagtgttcaaaacaagatcacatttccgtgatatatgtcacggaaatgatgagctataagtctctgacgttttggcgtcgttagcggttattcggtgcgttacttctgtggttcacccttagcaaatacgatggcggctacgctttatttagttaacgatgaatcgcgccacccggccgttaatcgtggctcgccgcccttgccagcctcattcatctcgtcttttgttaacgagatagtgaagagtatcaatgcagccagtggacaccctcttccggctgaaaaaaggcgttatagcgcagttgaaacgcgttgatctcctgcatatcgggttccatttcgcgcaaaaagcccagcgccagccgtacctgtgtatcggtgatcggcgcggctaaacgcgctttttgcagcaaccgatgccaccgctgcaaattctgatcgccgccatcgacaatcaccatttgccagatcagtaacacctgagcggcattttgcaaatgcgactcatcagggcgatgcagatactgtaaaaattcaccgcccgccgttttacccatctgatcaatcatcgattctatcggcactacatcaatattcagacgttcgctcaggcggcgaatcgcccggcgggtatccgatgtcagcacccgaaaccccacaataaacaccaccacaaacgtggccagaatcaaccaaatcatgcgcacatccgtcaccaaacaggatgcccatcataacggtaaatttataactgtcgacgttctggcctgtcaggatgtgatttattaacgcttgtcttcatttacgccagacgccggatgtcctgtctgacgaacgcaaggcataaaaaagcccggcgttaagccgggcaaaacgttaccaaatgcacacatttaagcgatattgacttgctgaatttttttctcacggcggattttgcgctcttccatcacggcgaccatcgccatcaggcagatacagccgatcgcggcggcgtccagcgcggcgaacgtgcccgcccagccggtcagaccaaaaacgggggtgccgtcggcaatcatgcccagacccagcttggcaaagctatcgccgataagataagcgaaggtgcccttgataccgtccgcagcgccgatggcttttttcggtacgaaaccgacagccgccacgccaattaatagctgcggcccaaacaccaggaaaccgagcgcgaacagcgaggccagatagacatactggttgctggcgtgctggtagacgccgagggtggcgatgattaacgccagcgccacacaggctaccagcgcacgacgaccgttcgccaggtcagagagccagccccacagcaacgtgccgaccagcgcgcccacttcaaacaaggtaaagccctgaatcgccacctctttagaaagtttcagctcctggaaggcgtagacggttgaccactggtcgataccaatacgtaccacatacaggaagatattggagaaacacagcagccagatcactttgtttttcaacacatattcaacaaagatctgccacttggtcatttcgttttcttcagtctctttatcctcttcgctgatctcttcgccgaacagttcttcagctttacccagaccgtaagattccggggagtcgctgccgaaacgcagaccgataaagccaacaatcagcgcgataatcgacgggaagataaacatgccgatgacgtgaccgtcgaacaggtagttggcgccgaacagcgccacacctgccgcgcccgcgccgccgaggttgtgggagatattccagaagccgagaaaggtgccgcgtttacgacgcggagtccatttggtgatggtcgagtagctgcacgatccgccggtactctggaagaaaccgctcagggcatagaaagcgatcatcagaaacagactggttgaccccgcgcccatgctggcgctgaagccgagcatacagatagcggagaggatcaacataaacggtagaaactgcttggtatttttaccgtcagcgtagtaggaaaccagcgttttccccacgccataggtgatcgagaagcccaggccaatcatccccagctcggtcatgctcaacccgtaggtagagatcatgtcgttctgcgcgatgttaaagtttttgcggatcaggtacatggtcaggtagccgataaaaaccaccagataggactgcatgaacggcttgaaccacattttacgccgcacatcgagcggcagatccagggtcggcttgcgcacctggtttaagaaggccagcatggattactcctgagctaatttttatacctgcgaatggcaggcattgtaaaaatccacaggaaaagtggcctgcgacagcgtccaggcaaaaccgggaaaatttcttagttttgccccattcagcgcaaaaaggtgaggtgtatcacgcttcgtgggtctcgcgtggggcctgagcgttcagaaatggcaacagcaatagcgcggagatccccgccgcgatggcgatgaccgcaaaaaaaccggtccagtgccagatctccagcactttcgctaacggccagccggaaagcgacgcgccgagataggcgaacaggccgacaaagccggtggccgcgcccgccgcctctttatgcgagcactccgccgccgccatgccaatgagcatctgcgggccgaagacaaagaaaccggtggtgaagaaacaggccgcctgcatcacgtagctggcgaacggcatcagccacagcgaacccacagagagcaaaatcccggcggcgaagattaaattcatcggtccgcggttgccgttgaagagtttgtccgagccccagcccgccaccagcgcaccgataaatccacccagctcaaacatcgatactgccgtgttggccgtgaccaaatctacgcccagcgtctcggacatatacaggttgccccagtcgttgatcgccgcgcgcaccacgtacactaagacataacacaacgaaagcagccagatatagggattcaacagcacatatttagcgaggatttctttgcgacttagccccgcgccctcttgctgttgggcgacctccagcgcatcgtgccgccagtcgcctaccggcggtaaaccaatcgcctgcggacggtcgcgcagccgccagcagaggaccatgcccaccccgatggcaagcaacccggccaccatcattccgacgcgccagccataatgcagggcgacagcggccataacgagagggatcagcgccccgccgacattgtgcgcggtattccataacgcccaccagccgccgcgctcggtacgcgagtaccaggcagtcagcaaacgggcgcaaaccggcgatccaaacccctggaaaaaggcgttcagcgcccatagcagagcaaaggcccacagcgaggtcgagaagccgaacagaatattcactacgccagtcgcaatcagcccgatgcccataaaatagcgagcgttagagcgatcgctaacgatgccggagacaaatttcgacaccccgtaggtgatgtaaaacagcgtcgccagcaggccgatatcgctgcgggtcagaatgccgctggcaaggatttccggcgcggcggcgttaaagcttttacgggtgaaatagaacagcgcgtaacccaaccaaatggtgatcaggatatgccgccgccagtagcgatagcgggcgtcaacctcgtgcttatcggtgatgagcggcgcgttggccggggcttttaaaaacgaaagcattatccttccttaaacgtaacgctggggcaacgagacgctcacccgcgtaccgtgggtacaagagatggttagcgtcccgccgagcgccgacacgcgttcgcgcattccggtcaggccgaagccctgctggtgagagcccggcggcaggccgctgccgtcatcctcaatcaccagcatcagccgctcatcctgctgccagccctggagcgtcaccgcgctggcattggcatgttttacgatgttattcagcccttcctgacagacgcgaaacagcgtcacgcgctgactttcactcagcgccgtttcgtcaattcgccagtcgaggtgactgacaataccgcggctttccagctccatttcgcgcagcagcgaacggatggcctgcgccagcgttaagtcgtctaactggcgcgggcgcaagcgccccagcaggcgacgcaccgcgtcatacacgcccagcgaaagctgctcgataagttgcccgctctgcttcacgccgccgttatccgccgccagtcgttgcacaatgcccgcctgggtacgaatcgcggtgatggtctgcccgatgtcatcgtgcagctcacgcgcaacatcgcgccgcacgctctcttcggtctccagaagacgctccgccagccgatggttgcgcgccagctccttttgcaacgactggttcagctcgcgcagacgctgaatgcccgcgccaagcagtagcccggtcaggctttgcgccaacagcgaaagtaataaatcgacgggatgatcgtgccaggtctggctggcgatcagcgcgatagcgttcatcagtgtggcaatgagcgcgccctgccagccataatgccaggcgagcgcgataatcggcaacgccaggcagaacggcgtaaagcgcgaaagttcagcaggtaaacccagttgcagccacagactgacgataaacagcagcagataccagatcagatgccgcccgcgccagtttaccggctgcgataccagcgatggtcccagcggcagccaggtagtgctggtgagatagtgccagaaaaccaggcagatgggggccagcgtcagaccacccgtgagggtcagcagtagcgcgttccatgcctcttccccctgccccagccagggcagggattgcagtagcgccgcggcggtgagggccgcgccctgaagcaataacgtgcgccagtcgcgctgatggcggtaacgcgaagtcagcgccacgggcagtagcgtcaacacactaccgatcatcaaaagcggcagatgggccaacgcaacttcctgcgccaaccagtacaccagcagccactccgcgcccagcaatactggccagtatccgcgcgggcattgcagcataagtcccaggcgcaggccgaagggaaagagtagcgccgccagctccgggcgctctaccagatgcaggctgatactccacaggcagaaccacgcggcggagaagataaaaaagcaggcaacaacggtgattaaacgggaaaaaaaggtgttcattaccaaccgtcaaacatgcgatgcgccagttcaacgtcattgctgacgcctaatttttccagcagattcgcgcgatggacatgcaccgtttttggcgacagccccagctcggcggcaatctcttttaccgccataccctgggcgagtttttccgccacctgacgctcgcgtttggtcagcggatcttgccgacccgccgccagtttcacggcaatatcgggggtcaaatagcagccgcccgtcgccaccgtatgcaccgcggcgatcagttcatccggactacagcgtttagagagaaaaccgcgcgcgccggcgttcaacgcctgttccaccagcgccgggctatcgtgaaccgagagcacgatcgtcgccatcccttttggcagttggcttagcagctccagtccggaaatatccggcattgagatatcgcagatacatacctgtacgccgcgccccggtaagcctgccaacgcttcgcgcccggaaccaaattcggcgaccacctgcaaatcaggttccagccccagtagctgtgcaaagccggagcggacgataaggtggtcgtcgataagggcaacggtgatcatgggttctgtcctgatggataaaaaaaacgcgcttaccttaacgataagcgcgcggctgttcaagccttgagcggtcagacaatgcctgtcgtgacggtgaacgtccgggtttgctgcggttccagttgaagcaaggttccatttcgctgcgccgcgagaaaaccttcaggccgacaggtcgcgggcagggcaaaggcggcaacctgctgatcgccgttataaagaatccagcgggtcatgtaatttagctccgcgctggcgaaacgtgtcacgaacgtggtgccatccggggcgatcatactgaattccggggtatccgtgtacttgtccagttcatcggcgaagaacacgatttccgggtcgtaaaagtcaggctcgttgagcgttgccagcgaggcttcaccctgcaaaagtcgttgattaaacgccagccactgcgccgtgggtttgacatgcgccggcaccgactcgcgtagcttcagcgcggtatccgggatattctgacggaacgtggcgttcggcacataggcatagttcatgtggcacatgtactgtagcggcatggcgactgaagccaggttagtcactgtcatctgaatatcaaacagcgcgcttgttttacgcattaccaccgcaggttgcgcctgataatgatgaccgaaccccatcacatactcgtagcgcccggtcacgcgcagactgtcgccctctaactccagccaggcgtcgtccatggcagcgcagggcatctcgccgtgcagcggatgtgtatcttctggtgacgggcagccattcgccaatagtccggaatggaaagcaaagcaaccatacgttgccaccacttccgcagccggcttcggctggcggaacatgttgcgcatagtcagatcatgaccgtcaaactgcgcgtcccaaatcatctgccccatccagggcagaatcaccagatgaccgcggctgttttgtattttcagtccttccacgccgctggcgtaacgaaacgccgtaaccgtaaaatcatcattttccagcaagatacgcggctgctcgctaaaaagctcccgccataatgtaatacgtgttgtcatggttgatctcctcaggacgcggcgacttcagccaggttgccgcgcactttgctttcgcgccagaagtaaacgccaacgtaaacaaagcacagcatggaaaccaggaatgagagctgtagcgagtggaacatgtccgccacgtagccctgaatcgcgggaaccaccgccgcgccgacaatcgccatcacgatcaccgcccccgccatttcggtatgctcgttatcgacggtatcgagcgttccggcataaatggtcgcccagcaggggccaaacagaacactgaccagcaccgccacgtataccgcgctaaagctgggcgccagcgccacataggccaggaacagcgcgccgatcacagagtaaaggatcaggactttttccgggttaaagcgtgtcatcagaatgttggcgataaacttgccgataaaaaagcaggcgaagctgtagaccataaaggttgaggcatcgcgctcattgatatcgcctaactccagcgccagacggatagtgaacgaccagaccgccacctgcattcccacatacaggaactgcgccacaataccgcgacggaaacgggcgttgctggcgagatagcgtaacgtatccagcgccgaggggcgtttatgactcgcggtttgcgcgactttacaggtcgggaaacgcgtcagcaggaacagtaccatcaccactaccagaaccataatcatgtacttatagggttccagagtgttttccagcatcagcaccttgaagttgtggacctgctcggcattcatgcccgccatctgtttttccaggctttccccttcggaaaagaccagatatttacccaataaaatgcctgccgccgcgccgatcggataaaaggtctggctgatattcagccgcagcgtggcgtaggctttcggcccgatcatcgaactgtaggtattcgccgccgtttccaggaaactcaggccaatcgcaatggcgaaaatcgccgcgaggaacatggtgtaggtcgccatgtgcgacgccgggaaaaagagcgtacagccgacaatgtatagcgtcaggccgataagtatcgccactttataactggtttttttaatgaccagcgaggccggaatagcaattaaaaaataaccgccataaaaggcgctttgtactaatgccgaagcaaagttgctcagcgaaaatacacttttaaattgcgtaatcagaatatcatttaacgcggctgcgcatccccataatgggaataaacaggataacaaaataaactggaacagaggtgtcttattcagatacccgtcgggcatctgaacgatgtttttatcgttcatagtgctacctttaacagtgcagggtgattgttattcgttcaacgaaagatactcattaaattgctcaatacttggataagaggattgggtgcctttcccggtgacgctgaaagcggcaaagagaacggcttttttcatggcggcttccacatccccgctctggacgtagtaatgcgcgaaacagccgataaaggcatcgcccgcgccgctggtatcgacagcgttcactcgaaacgccggaacatggacttcctggtcacgcgtcatccacagcgcgcctttctcacccatggtgacaataatattgttcagccctttatctaccagcgaacgtgccgctgcgcgaatatggtcataggtatccactggcataccggttaatatttccagctcggtttcattgggtacaaagaaatcgcatttacaggcataagacatatctaattcccgtaatgctggcgcagggtttaataacacttcaatcccgtgtttcttgccaaattctattgcgtgataaaccgtttcaagctgaacttccagttgcagaacaataagctggcatttttttaaatcttccgccgcgcgatcgatatcttccggcgagagaaacttgttagcgcctttgatgatcagaatgctgttgctggagttggcgttgacgaaaatcggcgctacgccgctgctggtacacggtactttttctacatacgtcgtattgatcccccaggattcgagattacgaatggtgttgtcggcaaaaatatcgtcgcccactttggtcaacatcaatacttttgaattgagcttagcggccgccacggcctggttcgccccttttccgccgcagccgattttaaacgccggcgcttccagagtttccccttctttgggcatctggttggtgtaggtgataaggtccaccatgttagagccaataaccgcgatatccattttactccctctcagaaatcgtcacacgacaatgatattaaaataacattatcatgttacttccgtatcatttgtgactatgatcgcgattagaggatcattttgccatttacttcgtgaacaatccctggcggaacatacgcgcaccaaatcatttttattgttacaatttactgaaaattaactatttattgttataaaacgcgaataaacccacttttatttcctgacagccggacgtatagtagtgccacactgtaatgttctcagaaacacataaatgttactgatggaacataacaacatgatttgcggagagggtgaatggagaccaagcaaaaagaacgtatccgacgcttgatggagttactgaaaaagaccgatcgaatccatctgaaagacgccgcgcggatgctggaagtttcggtgatgaccattcgccgcgatctcagccaggatgatgaccctttaccgctgacgctgctcggcggctatatcgtcatggtaaataagcctgcgtcttcaaccaatatgccgctgccggcgaaaaagacgcatcatcgggacgaccttcccgttgcgatcctggccgccggcctggtgcgtgaaaacgatctggttttttttgataacggtccggaaatgccattagttatcagcatgataccggatgatattacctttaccgggatttgctactcgcatcgggtatttatcgcgctgaatgaaaagcctaatgccacggcgattctgtgcggcggcacctatcgggccaagagcgatgccttttatgatgccaataatccttcggcgctggattcgctcaatccgcgcaaagtgtttatttccgccagcggcgtacatgaacattttggcgtgagctggtttaacccggatgatcttgccgccaaacgtaaagcgatggaacgcggtctgcgcaaaattttgctggcgcgtcacgccctgtttgatgaggtcgcgcctgccagcattggtccgctttctgcctttgatgtcctgattagcgatcgcccattaccgacagattatgccgttcactgtcggaatggttccgtcaaagtcatcacgcctgattcggaaagtgaataacttactcaaaaaagacggcaattttattgaacatggtgggatcggactggtttcgtaccaccttcgccacgtcttccagtttatcgatctgactgatcatctgttcaagtcgctgatcgtcattgaccagaagccagatgcggctctgatcgctaccctgaatcggtaaacagagaataccctcaacgttgaaagcgcgtcgggcgaacagcccgcagacgtgggtcatcacgccaggatggttgcgaacggtcagctccagaataacgttatcatgtgattgtttctgcatggcttattcccccaccatctctgtatttgccgcgcccggcggcaccatcggatacactttttcttctgcatcaatgcgcacatggatcaacgccggtccaggacgacgaatgatagcctgcaacgccgcctgcggatcggcttcgttattcaaatcacaggtgtccagaccaaacccggcggcaatctgcataaagttgatgcttcccggataggtcgccgcaaaaacgccctgtttatagaacagactctgttgctgatgtaccagtcccagcgcgtcgttattcatcaggatgattttcacatccaactggttttcactggcggtagccatctcctgaatattcatcatcaaactaccgtcgccggaaaaacacagcaccttgttgcccggattcgccagcgccgcgccaatcgccgcgggcagaccaaaccccatggtgcccagcccgccggaagtcagccactgacgcggacggttgagcggataagcctgcgcggtccacatctgatgctgacctacgtcagtggtaataatcgcgttgtcgtccacacaggcggcgaccgcgttaatcagcccatagtgactaagcgggttattttcctggggaatactgcaagggaattcttgctgcaagtccgccaccaactgatgccatgcttcccgcggctgtgcctcgatatggggaattaactgtgccagtacatcatcgacatccgcctgaatagccacatgcggctgcttaattttgcctaactcggcgcgatcgatatccacatggatgattttggcgttcggacaaaactgctccgttttgccaatcgcccggtcatcaaaacgcgcgcccagaacaatcagtaaatcggcctcttgcagaataaaattggtactgcgcgcgccgtgcatccccagcattcctaacgacagcggatgcgccttaggcagcattcccagcgccattaaggtcattgtcgtcggcagttgcgctttttccgccagttcgcgcacgcgtgtcggcgcattgatcacgccgccgcccagatacagcaccggacgcttcgccgcgttaatcattgcggcggcctcgcggatactctccgcgctaaactccggcgggggtgatttttccgccggcgacggcaacgcatccagctcaattgtcgccgtctgcacatctttaggaacgtctatccacaccgggccgggacgccccgactgcgccagacgaaaagcatcgctcatcacctgaggcaactcattgatatttctgaccagatagttgtgcttggtgatggggatagagataccgtaggtatccacttcctgaaacgcgtcagtaccgatcatggacgccggaacctgcccggtaatacagattaacggaatagaatccaggcgcgcatcggcaatggccgtgaccagattggtcgcgcccggcccgctacaggccatacaaacagcaggtttaccctccgtccgcgccatcccctgcgcaataaaccccgcgccttgttcgtggcgcgccagaatatgacggatttgcgtactttggcttaacgcgtcgtaaacggggaggatcgaaccgccgggaatgccggtgacgatacgaatcccctggcgctccagaaaatgaacaataaattccgcgcccgtaaagcgctgaggtgtagatgttgtgcccgaacttgccatgctccattccttttattctgagccgacgttccgggaaggtgtcttaaacaaaaaaccccgcccggtttgcgccggcggggttttggaatcgtgtgtgttccggaccctacggcgcattgccgacgaccaccaccacacgcacgacgaccactgcgcgagatggcgcagttgttagtagggtcgcgttcagcatggaagggttcattaggggccttgtctgtttgttattaacacgttttatacaagcacagcgctttcagcatgacaacggaaaaattttcatctgcacaaaaatgcgtcagcgatcacatttttctacgaatttacacgctttgagtataggcgtgataagcgtagcgccctccggtaatcgccgggattgatgatcacgcatttcacaatgccggaaaacaaaaaacctcgccgaagcgaggttcttacagcgtaatgcgggtggtagccgcgaagcacactgtgttatgtcaacagcagaagtatacgcgttctgtgcagaacgcgcaatttcggcgcgaattttgatgaatttgagtatggatcagaagctccgttctgtctataaattactgttcatttatacagtacttaactataatgtctttgacacaatgtgttatgcgggggccgcatcgtaaaccggcgcaacgaagtcctggctgaaacgggtggtgccgtcagcgccttaaccccctcgtgagcacactgtgttatgtcaacacgcacactattcctcgcaaaagggatcgcgtgcgcaacagctggcaacaggcagcggaaaggtacgtcggctggcagtgctccttaaccacaggagacgcgtatgagcgtagtggatatcaccattcttatcctgaaactcattgttgcagcactgcaactgcttgatgctgttctgaaataccttaagtaattcagattcaagccgcaccgaaggggagcgggcaaccgctcccctttcaccttatccgctggtctttcgcttcccgggtatgttacgtttttatgacaccctcaacgacgcctgacgctatgaccctttccgttttctgcattttgctgttcgccgcgctgttacatgccagctggaacgccattgtcaaagcgggaaacgataagctctacgccgcgatcggcgtcagcggttccgcggcggtcatggcattgatccttttgcccttctcgccgcagccagcccacgccagtatcccttttttagcggcctctaccgcgctccaggtggtgtataccgtcctggtggcgaaaacctatcaggtctcggacatgagccagacctatcctcttatgcgcggcaccgcgccgctgctggtggcgctcattagcgttctgtttcttggcgacagcctgtcgtcgctggcctgggtcggcatcgcagtgatctgcatggcgatacttgggatggcctgtaatggccgcgccagctctcaacgtggtgtcgtgctggcattaactaacgcctgttttattgccggatatacgctggtggacgggaccggcgtaagactctccgaaacggcgctgggctatacgctatggtcattttttctcaacggcgcctgcctgttaacctgggcgatgattgcgcggcggcgggaagcgtcgcgttatctggcgcaacagtggaaaaaaggcatttttggcgggattggcactatgggatcttatgggctggcgctatgggccatgacccaggcgccgctggcggtggtcgccgcgctgcgtgagacgtcgattttattcggcgcgctgatagcctggctgttgcttaaagagaaagtggccgggctacgtctggtggcggctggcgggattgccctcggggcgattttactccgtctgtcatgatcgcccaatgacagccgcagacgtaacacattctcggcaacatttgttgccgcttttgtttacatatcctgccgttccttcgtctgccattgctggttgctgtctggccttctttttctggtgtgatagattcctctcgcatttatgggaatgcgcagcaagttattcttattttttctttttttgaaaagcaatcagcgaaatgaaaaggcagagaaacgtcaatttgttgttgatgttggtgttactggtggccgtagggcagatggcgcaaaccatttatattcccgccatcgccgatatggcacaagcgctaaacgtccgggaaggcgccgtccagagcgtaatggctgcttacctcctgacctacggcgtctcgcaactgttttacggcccgctttccgaccgggttgggcgccgccccgtaatcctcgtcggcatgtctatttttatggtagcgaccctgttcgccatgaccacgcatagtttgacggtgttgattgccgccagcgccatgcaagggatgggaaccggcgttggcggagtaatggcgagaacgctcccgcgcgatctgtatgaaggaacgcaacttcgtcacgccaatagcctgttaaatatggggattctggtcagcccgctgttagcgccgctgattggcagcctgctggataccctgtggaactggcgcgcgtgttacgctttcctgctggtgctttgcgctggcgtcaccttcagcatggcgcgctggatgccggaaacccgccccgccggcgcgccgcgcacacggctgatcgccagctataaaacgctgtttggtaacggcgcatttaactgttacctgctgatgctaatcggcgggctggctggcattgcggtctttgaagcctgttccggcgtgctgatgggggcagtattaggtctcagcagtatggtggtaagcattctgtttattctgccgattccggcggcgttcttcggcgcctggtttgccggacgcccgaataaacgcttctcaaccctgatgtggcagtcagttatttgctgtctgctggcaggccttatgatgtggattcccggctggtttggcgtgatgaacgtctggacgctactcatccccgctgcgctgtttttcttcggcgccgggatgttatttccactggccaccagcggcgcgatggagccgtttccgttcctcgcaggcaccgctggcgcgctggtcggcgggctgcaaaatattggttccggcgtactggcgtggctttcggcaatgctgccgcaaaccggtcagggcagtctgggattgctgatgacccttatgggattgctgatcctggcgtgctggctgccgctggcgtcacggatatcgcatcaggggcagacggtttaacgtttccctcgcccggcgttttgccgggcgtttcacattccggcgcgatcatcgcattgagcagggactcctgcgccggacgccacgctccttcttcgccgtcataaaactgagtgtccgcgtttatcgcatacggaatatgcgcttttttcagctcgcaggccataaaacgggcaaacgcgaactgtgaagcgaccggcgtcatttttatcgactctcccggcgcccatccgcccacccagcttgcatggccggtcttatgctgccagcgaaccgcagcgttgatccgtgcccgaatcgccgctttttccgccgccgtgcctgacgtccacggatatttaccgccgcttttcaggggtccccacgggaagatgtgccactccgccagtacatagttctggctttgcgccggcagtttaagcgccgacaaatcctccggcgcggcgcgcatgcggggggcaacgaaaatcatccgctgtgggtcaatggcgtgaatcaggcggatggttttgtcatatacgcgattcagcgacgccatattatgattaagtttgtcggcaggctcataaatgagatcgaaccccagaagcggggatgtctgaccaaaatagcgcgcgaccacgctccaccagttgatcagctccttttcatggctggcgctgggatcggttttatacgcatccgcctgataggcaataatgggtatgacgccatagtattcgcaggcctctaccagcttacgcaaatggatgaggcgcgcttccgtcggcgcgcctgccacacgaatacggacatgcgttaacccttttgccttaaaatcccgcacgaccagcggatcaaactcgcggataccccgttccgttcgcgcccagtcaacatccatcccaacgccaagctgctgcgcatagcgcgccgccgtcaaaggcatcggtttcgcatagacgaccgcgctggtcagcatgagagaggcaataagcggtttaaacacgacgccccctaaaatttttaccacggtgatagcacgtatttagcatattcactcccggcaggtgtagcgacaaagcgtaataaatcttcacacctgttcctgcaaccagcgaataaatgcctcgattttcggccactgcctgccaggcagagtggtgacataataatgctgatgacatttcagcctcatgtcaccaaaaggcgcaatcagttcaccgctgtcgagacgcttttgcaccagccgtttacgccccatcgccacgccaatgtggttcatcgcggcaatcaccgctaaatcagaacgatcgaagccaatgccggatgaatccggcaaatttactgcaaaatgctgcgcccaactgtgccactcatcggtgcccgaatcgttactccacgcctgtctgtcgtgtaagagcgtacagtgccgtaggttattcaggttatcctgcaaggcgaaacgacgggcataatccgggctgcaaacgggcaaaatcgcctcatccattaaaaaatggtgcgtgagctgcgccgacggcgcatcgtcaaaatagatagccaggtcaatgccggcacgctgtaggttaacgttatcgttgccggtcagcatagtgagagaaattgacggatagcgacgggtaaagtcccccagcgcaggcaccagccagcactgggcgatagagggacgtgaatacacggtcagcgtgccggacagttcctgatttttgatatcgaggatttcctgattcaacgtatccagcgacgatttcagcgcccagaatacccgtttgccttcatgggtaagctccactttacggtgagagcggacaaatagctggattcccaactcggcttccagttgattgatacgatggcttaccgcactggggcttaacgacagctcatctgccgccagagcaaaggactggtgtctggccgcgacttcaaaagtatagagtttggataactgccagccgttgagtaagcggtttcgggtatcgcgaaggggttccatggcaacctcagtcatcttttaatttcccgaagtgtaaaaaaacgcgctgaaaaaatccgcacatagatgaagtaaaatgaaccatatcgcaaaataaaggcaatattagatggaaatcacatagttgattcaatttacatcatgtgaatggcaaattatatcgtttgtcagggtgtgctgtttttctgtccaataagaacagattaatcacagggtaggtgagatatgcacgctcaaatctgggtagtgagcacgctgctgatcagcatcgtgttaatcgtattgaccatcgtgaagtttaaattccaccccttcctggcgttactgctcgccagtttctttgtcggcgcgatgatgggcatggggccgctggagatggtcacggcgatagaaaacggaataggcggtacgctcggttttctggccgccgttatcggtcttggcaccatcctcggcaaaatgatggaggtttccggcgcggcggaacgcatcgggcttacgctccagcgctgccgctggctctctgctgacgtgatcatggtactggtggggctgatttgcggtatcacgttgttcgtggaagtgggcgtcgtgttgctcatcccactggcgttttctatcgctaaaaagacccatacctcgctgctgaagctggccattccgctgtgtaccgcgctgatggccgtccattgcgtggtaccgccgcatccggctgcgctgtttgtcgcaaataaactgggggcggatatcggctcggtgattgtctacggtctactggtcgggctgatggcatcattggtcggcggtccgctgttcttaaagtttctgggtaatcgtctgccgttcaagcccgtaccgacagagtttgcggatcttgaagtgcgcgccgaaaacaccctgccgtcgctgggcgcaacgctgtttaccgttctgctgccgattggcctgatgctggtgaaaaccgtcgctgaactgaatatggcgaaagacggcacgttgtatacgctgctggagtttatcggtaatccgatcaccgcaatgtttatcgctgtctttgtggcgtattacatactcggtctgcgccagcatatgggtatgggcacactacttacccacaccgaaaacggctttggcgccattgcgaacatcctgctgattatcggcgcgggcggcgcgttcaacgccattctcaaaagtagcgggctggcggacacgctggcggtgatcctctcaaatatgcatatgcacccgattctgctggcatggctggtagcgctgattctgcacgcggcggtcggatctgcgacggtggcgatgatgggcgccaccgcgattgttgcgcccatgctgccgctctatcctgacgtcagcccggagatcattgcgattgccattggttccggcgccattggctgcacgatcgtgaccgattccctgttctggctggtcaagcagtattgcggcgctacgctgaatgaaacgtttaaatactatacgacggccacgtttatcgcatctgtcgttgcactggctggcacattcctgctttcctttatcatctgatcgtaaagagacgtactatggaaaacatacaaaagctcatcgcccggtatcctttggtcgaggatctggtcgccctcaaagaaaccacctggtttaacccgggcgccacctctcttgcacaaggtctaccgtatgtcggcctgacggagcaggacgtaaacgccgcccatgaccgtctggcgcgctttgcgccgtatctggcgaaagcgtttccgcaaaccgccgccgctggcggcatgatcgaatctgacgtggtcgctattccggccatgcaaaaacggctggaaaaagagtatgggcaaacgatcaacggtgaaatgctgttaaaaaaagacagtcacctggcaatctctggttccattaaagcgcgcggcggcatctacgaggtgctaacgcacgcggaaaaactggcgctggaggcgggtctgttaaccaccgacgatgactatagcgtgttgctttcgccggaatttaaacaattcttcagccagtacagtatcgccgtcggttcaaccggcaatctggggctatcgatcggtatcatgagcgcctgcatcggttttaaagtgacggtacatatgtctgccgacgcccgcgcctggaaaaaagcgaagctgcgtagccacggcgtgacggtcgtagaatacgaagatgattacggcgtggcggttgagcagggccgtaaagcagcgcaatccgatccaaactgtttctttatcgacgacgaaaactctcgcacgctatttctgggctatgcggtagcgggccagcgcctgaaagcgcaattcgcgcaacagggacgcgtcgttgacgccagtcacccactgtttgtttatctgccgtgcggcgttggcggcggccctggcggcgtcgcctttggcctgaaactggcgtttggcgacaacgtccactgtttctttgccgaaccgacccattccccctgcatgttactcggcgtttataccggtctgcacgatgccatctcagttcaagatatcggtattgataacctgacggcggctgacggcctggcggtaggtcgcgcttcgggttttgttggtcgggcaatggagcgtctgcttgacggcctctataccttagacgatcaaacaatgtatgacatgctgggctggctggcgcaggaggaaggaattcgactggagccatcagctctggcggggatggccgggccacagcgcatttgcgcctccgtcgcgtatcagcaaaggcatggattcagtcagacgcagctcggcaacgcgacgcatctggtatgggcaaccgggggcggcatggtgccggaagatgaaatggaacaatacctggcaaaaggacgctaatactcactcagtgccggaaagacggcagcgccatccggcacgccatcgcctgatggcgctacgcttatcaggcctgtgacgttaacgcagcatcgccatcaactcctccggcgagcgatgctgcttcagtaaatcccgcatcacccgcatatgcggcgaggagtagttaaaaaaggtctggtagccctcgcaaagctgatttttcccctggctatcccgatgctcagggcatccgccgccgcaaaatcgtaataaagagcacttctgacattcagcgcttagcggcaccttgtccggcgcttcggcgccattcctgccgccgcaccactgctgtagcgtctcatcaaaaaggcgaaccgagatacgctgaatatcttcacgtacccaaatatcaaatacgctatttaaaaaccgcccccagtctgctgaacacaatgaatcctcggtcaacattccgttccggtcatgttccaacaatgggataaaatggacattgcgaatgccgagccgttgtaagttacggtacagttgctgagggcgctggctattctggcgatttacgacgacctgaatctggtcatcactcacgacaatgtcctgacgtcctgtcatataaaattcccgataaatgcaataagttggcgaatatgggtaacagcaaacaggattgcgagcgacaacaccgcgagggagatcaaaaatttgtcacgcacgacatgagtttcggaaaaatcgctatgcgcgacatccatcaaattacgactcagggtataacgccaaagaatcaccgccactatcgccagaacgctgattgacacccagaacaagaaccccgcctgatgccagtggtgcctgacggctaacgccattaacgccccgtatcccagcagcgtgcgaaaccaggccagcgacgtacgctccggttgcagtcccggatcgttctgccgacgggctttacgactatccggcatacagtaccagccccatcactatcaccgcgacaatcatcaaaataacgctgatgatcaacaggctatgggtatagggcaaatcctctttcaggcgcatcgctttttcattacgtaaccagcgtagatagccataaatcgccaggccgcccgcaaacagacacaacaatagcgccagcagttcacggatcaccggcgtggcaaaatccggggcgagctgatcaagaccgacgcctgccgccagaaatcccagcgaggtgcgaatccacgccagaaaggtgcgctcatttgccagtgagaagcgataatccggcgcttctccgaggcgggaaatcttcatgacgactccttttacgttcttatgtattcccgttcgttttcagaataccactcacgttgttgctgatatgcttcacattatcccgcagcaagggaatcttattgcaaaataactgtagttcactggtgatgcgttttggcgcaaccgcgctcattgccgctatttttcatttcagttacgacctttttcaacgccaccgccaggaaaggcattattgccgaattaaaagctgaaaaaccacccgtcgcgacgaaaaaaaaggcgaagaagattgataactaactgaaaaaaattggaattatgctcgttggcattacgctgattagcgcgttcattgaggaaagagataagaagaagagcagaagtgtggccggtgcggcgcgcgttatccagcctggatttaacacagtgcgtaggccggataagcaacgcgccatcaggcgctaacccattccccaaaaaatcaccgccagcagttgtggcgtgataatacgcaggaacatcactaacggatagacggtcgcgtaagagagcgccgccgcgccgctggtggcatgaagattgttggcaaatgccagcgctggcggatcggtcatcgaaccggccagcatcccgcacagcgtcagatagttcattttggcaaaaatccgcgccagcaaaccgacggtaatcagcggaatagcggtgatgaaaataccatagccaatccagcttaatccttcgccctgcgtcagcgtatcgacaaaatcgccgccggatttcagcccaacgaccgccagaaacaaaacgatgcctaactcacgcagcgcgaggttggcgctcggcggcataaaccagtacagcttaccgatgctgccgatacgccccaaaattagcgccatgatcagcggcccgccggccagccccagttttaacgcgaccgggaatcccggcacaaacaacgggattgacccaagcagaacccctaatccgatgccgataaacaccggcagcatctgcacctgctggagtttttgctgcgcgttgccgaccacattggctaccgcatcaatcgaggctggacgccccaccagattgagaatgtcgccaaactgcaggctagcgtcactactggcgaccagctcaacgcccgcgcggttaaggcgggagataaccacgtcataacgctctttaaagtgcaaatcgcggatacgtttgccgagcactttttcgttggtgacgaccacacgctcgacgcgtaaatccgtgccacgcgtcgacaacgaggtgtccacttccttgccgatcaccagttgcgcgttatgcaggtcggtagattggccgacgaggtgcagcaggtcgcctgcctggataatcgtccccggcgacggcaccatcagcgtgtcgtcgcgtttcaggcgtgagcaaatgattttatcgctgttcaggatcggcacatcctggatagccatattattgaggttcggattctcgacacggatattcattgtctgaattaatgaatggccgttagcgagagaggattcgtgcttctgcgcctccgcctcgacgttaacgcgaaaaatcagccgcatcagccacatggtgagcaaaataccgcagatgccaaacggatacgccatcgcatagctcatccccatctgatccaccagatccactggcgttcccagatcgcgcaggatttgctgacccgcccctaacgcaggcgtattggtgactgcgccggagaaaatccccagcaccaccggcagcggaatagcgaaaattttatgcagaatcgcggtgaccaacccgcccataatcacaatcagaacagcaaacagattgagacgcagcccggaaacgcgcagcgaggcgaaaaaccccggccccacctgtatgccgatggtataaacaaaaaggatcaggccgaattcctggataaagtgcagcatatcgccactcagcgtcaccccagcctgatcgacgaagtggccgacgataataccgccgaacagaacgccgccaataccaaagccgacaccgcgcactttaatgttgccgatccataaaccgacaaccgccaccaacgccagaacgctgaccgtcaatgcgatatcactcatcttttcttccctgtgagtaacatttcaatttatagggattatgactgaaccgttaaggcatatatacagcatggcgcacattctcatgttagaaaaccgcccagacgtcctgacttcggcagcgtcttaccctttttcgtggcataaaaaaagccccgccatctctggcggggcaaggcaaggagctcattagctatttaatgcggagcgttcgttaatggcgatacgctgcggcgcaatggtttccggctcgttgcgggttaaatcaatatgcagcaggccgttggtaaacgtcgcgccggaaacttccatattctcagccagcgtaaagctcaggctaaaaggctgcatgaccaggccctgatgtaaccatttgggctcgttttccggctgttccggcgtacctttcaccgtcaggcgcgtgccttccagttgaatatccagatcttcctgacggaaaccggctaacgctaaggtaatgcgataatggttatcgtcgcttttttcgatgttatagggcgggaagctctggctttcgccgctgttttgcagcgcattggccagcttgtcaaaaccgatccattgacgcagcagtggggataaatcgtagttacgcataatcatttctccttctaagaagcgagtttttaccttcacactttacgtgcgaatatgctccctgacggcgagcatgggatgacaggccgcgcaacgcgacccgacggaatcagttaatttcgatacggcgcggtttgttcgcttccggaatcacgcgctccagttcgatatacagcagcccgttgaccaggtttgcgccgcgaacgtgaatgttctccgctaactggaacttacgttcaaagttacgctcggcaatgccctgatacaggtaagtacgttctttctgctcgtccgcatgagcgccttttaccaccagtaaattatcctgggcagtaatctccagttcgctttccgcgaaaccggcaacggcaatggcgatgcggtagtggttttcgtctaccagctcaacgttgtacggagggtagccgccattactttggctttggttattttcaagcaggttaaacagacgatcaaaaccaatggcagaacggtacagcggggataaatcaaagttacgcataatcataaactcctgaaatcagcgagaatgtcagaccttccatcatggacaggccaggattgccagaacacccatcaggcgtgcccttctattcactacgtcttataaatgggtctgaatacgtacttttcaagtattttaatccggcttttttttgcagtttattggctattgcatagactggttgggacagcactgattgttaaagtgcgattaccgccacagtgccacgtactggtgatgttatttttagcaacggatcgctataactcatcatgcaaataacgacaaccaacagatgaatgagtgatgataaaaaacgtgtggttaacgctgataatatggaatgggatgcttttattaagcggttgttcaagcgtcatgtcgcacaccggcggtaaagagggtacttatcctggcacgcgcgccagcgctacgatgatcggtaacgatgagacaaactggggcaccaaatcgttggccatcctggatatgccatttaccgccgtgatggatacgatccttctgccgtgggacatcttccgcaaagacagttcggtaagatcgcgcgtagagaaaagcgaggaggagacgaaaatgaccaatgccgtcatccccccggcgaagatgcctcctccctgatttatcgcccggtttccgtcacccatagctgacggaaccctttcacctcttccatccatgcgacgtgtcgcccatccggtgaaaaaacgacggcgtccgcagacggcgggttgtcgtgcctggcggttaagaagtcgatcctcccactttgtgcgtcgcagcaggcaatccggttttccagcaccagtcccagccatttacccgacggatgccagttaaacgctgactgtacgccggtcgcatgatgcgttaactgccggggctcgcctccctgcggcgatatcagccacagttgcgctacgccgttatcgtcccgcatcaaaaaggcgatcgccgtcgcctgcggattactgcggacccagtggcgtggttcgttagtgagtccaggataaacacgctggtgagtaaaggtaagacgccgctgaactacgcccaacggcggcgatggcatcgttgattcggttcccgtcagcggcgtgtcgcctgcctgtttccagccgttttcatgacacggtaaatcgacaataaacagctccgggacttttttgcccgtcagcgacagcgtatcgccaataaaggcgatctggcggttgcccacccagccctcttcataggcgcggttaatgtcatcgctgccaggtctcggcgcaggcgtcgtgcggctaaccagtacgcaccagtagctaccgctgtattcgcgcggatgctgaaccggtaccgttaccggcccatacggcacggccacgccgacattacgtagatccagcgccggatctcgctcatgcagaacgtggtcattataggtaaaactcaccagctcgccgttcgggctaaacacatggacgtgactgccgccgcgcagcgcgccgggagtatacggcgcagtaatatccatcgcatcgaggttagtcacgccccccggcgttgcaataacgccccggcggtggtggaaatcgtaatgccacgtctcatcagggttttcagggccatgaataaacacatagtgattgtcggcaggatgcaccgtcaccacaccgacatgcgcgccctgcacagcgcgataaatcacctccacgtcgccggtatgcacattgacacgctcaatggtcttgcccgtaaatgacgcgcctgaaggccgtacatcaaagaccagccactggctgtcaggtgtccaggtattggtgttggtaagctggtgatggcgcggcgtaaaagtgatttgtttcatgggatgtcctgataagagacgatgctcgtcatcatactgcacacgggcttcactttcaggctttagcgtatcgttgggatagccaggcccgatggcgccacgccaccgggccgtcagggcattatttctcctgcgccagccggatactgcgctctatcaccgcccgccgggcgtcacccgccggcagcagcttcagcatcatctcccaggccgccaccgcctcgccaaagcgctgctgctcaaaggcgttaaacgcatacaggcttaacacccggatatccgtgtggtcgcggctcaccagccggcgcagcagctccccgccgcggcggttatcctccgggtcggacgagcgcgtcagcgcctccgcgtagcccagcgccgcatcgcggtttttcgggtccagacggtaagcgtttgcataggccccggtggcggtaccggcattacccagtaccataccggtgcgccccagcatgagccagccctcaacattgccggcatcattctgcaggcgggtgcgcagccccagcgccagccgcgccatctcctcctcattcagcggctgcgcctgcgggtccagcgcccgcgccagcagcccgggcgtctgcgccgttgcctgctgccaggccctgacctgcggatagctgccggtcagggcgtagctgccggcgccgaccgccagcgcaatgacggcccccggcacgtaaacgccccacccggcgcgcgcgccgcaaaccggggtgtccgccggcagcggctcccggcgcaggcgcacccgccggcgcgtgcgggcgacgattatccacccgcccgccacgatggcggccagcggcagcacccacagcagcaccgtcagcggggtcagcggcgggtcgtaggtgacgaagttgccgtagcgcgccaccatataatcgatgatttcctggcggctcttcccctcctgcatcaggtcatacaccctgcggcgcatgtcggtggctatcatcgcgttcgagtccgcaatgctgttgttctggcatttcgggcagcgcagctgctccgtgagctggcggaactgctgctcctgcgcttcatctttaaacggcatcacgtcggtggttgcccgcgctgacccggagataaccagcgccagcatcagcatcaccatgcccggtaacagtctcattgcgccgcctcccggctgtatctgtcccacagcggtttcagttcactttcccatacccgggcattcaaatcgcccgcatggcggtagcggataatccccctgccgtcgatgaggaaggtttccggcgcgccgtacacgcccaggtccagccccagcatcccgtcgctgtccgataaactcagcgcatacgggttgcccagttcctttaaccaggccaccgccttcgcccggtcgtccttatagttcagccccaccacccggataccctgcgcagaaagctggttcaggtactgatgctcggcgcggcaggtcgggcaccaggtggcccagacgttaagcagcaccggtttcccctgcgtcagcacctccgcctgatagtactgacccggcgtctccagcgattccaggcggaacgccggcaccggctttccggtcagtgccgattcgagattcgtcgggtcatccccctgcgcgttgcgcgccagctgccacagcagcgccgcggcaatcagcagaaaaatcagcagcggtaataacagtacgttgcgtttcatccggcctccggcaatggtttacggcggcggtagcgcgggtccgccaggcacagcagcccgcccagcgccatcagcagtcccccggcccatatccagcggacaaacggtttgtagtacaggcgcacggcccacgcgccgttgtccagctcctccccgagcgcggcgtacaggtcgcgggtcagcccgccgtcaatcgccgcctcggtcatcaccatccggctggtgttgtagagccgtttctccgcgtgcagcaccgcctccggctcgccgtggcgcgtcaccccgatgagggccaccccgccgcggtagttgggcccggtgatgtcccgcacctcccggaaggtgaagcggtagtcgtgaatggtcacgctgtcgcccgcccgcatccgcacgtcacgctccacgctgtaattctggctgaaggcgatgccggtaatcgtcaccgccagcccgaggtgcgccgccaccattccccagtagctgagagaggttttcgtgccgcgggacacgcgctgtacggcttcggccaccgccagcaccgcaatccagcaggccatcgccatccccaccgccgtcatggcgatgattttatcttccagcagccatggcaaaagtaccgacagcaccagggtggagaccagggcggtgagcagcagcgtcctgatgttacgcggccggtcccggccccagcgcaccagcggccccacccccagcagcagggcaaaggggaccatcagccaggtgaacatggtgttaaagaacggctcccccaccgaaatgctgcccagccccagctgtttgtgcaccagcggcagcagggtgcccagcagcaccaccagcatggcggccatcagcaggacgttgttgccgagcagcagcgactcgcgcgaccacagcgcgttgttcacccgcgaacgcaccctgtgcccgcgcacggcgaacagcagcagcgagccgccggtgaccagcaccataaaggcgaggataaacatcccgcgcgccgggtcggaggcgaaggcgtgcaccgacaccagcaccccggagcgcaccaggaaggtgcccagcaggcacagcgagaaggcgcagatggacagcagcagcgtccacgccttaaagccggcgcgctgttcggtgaccgccagcgagtgcagcagggcggtgcccgccagccacggcataaaggaggcgttctccaccgggtcccagaaccaccagccgccccagcccagctcgtagtaggcccacgccgagccgagcacgatgcccagcgtcaggaacacccacgccgccagcgtccacgggcgggcaaaacgggtgaacgcgctgtccagacgcccgctcagcagcgcggcgatggcgaaggcgaaggccaccgagaagccgacatagcccatgtacagcagcggcgggtggaaaatcagccccgggtcctgcagcagcgggttcaggtcgcgcccctccaccggaaaggccggcagcgtgcgggcgaacgggccggaggtgaacaggatgaacgccagaaaaccggcgcagaccatccccatcaccgccagcacccgggcgacgatatccgccggcacctgccggctgaacaccgccaccgccagggtccagccgctcatcagcagcacccacagcagcagcgagccctcgtgcgccccccaggtggcggccacccggtaccacaccggcagctgcgtgttcgagttgccggcgacataggccacggtgaagtcgttaaccacaaaggcgtgcaccagcacgaaaaacgcgcccgccacgcagataaacagcagccaggcgaacaccccggccgacgccatcatccgcgcgtcaccgcgcgccacgccccacagcgggtaaacggacagcagcagcgccacgccgagcgccaggcacagcagcgcgtggccgtattcaggcatcatgatgaggtgtccttatcagcgcgttgcgggcggcggtggttttcctgcatcgccttttccacttccggcggggtgtagttctcgtcatgtttggccagcacctcgtgcgccaggacgtggttgcccttctccagggtgccctgcaccaccaccccctgcccctcgcggaacaggtccggcagtatcccctcatagctcaccgtcaccgacccttcggcgtcgtagagactgaagttcaccttcagcgagtccgggtcgcgcctgacactgccgggcatcaccatcccgccgacgcgcaggcgctggcccgccgccggcagctgctgcgtctcgcgcttgccgtagaggatttcgccgggggtatagaacaggtcgatattcgcgcgcagcgcgtacaggaccagggcggtggtcagccccaggcccgccagcaccgcgcagaccacccatagccggtttttacgtcgcaggttcacgcggcctcctgttgcgcctgtgcggcacgcatccgcgcctcgcgcgcccgctgctgcgccacgccgcgcagaatggcccggcgctgcagcaccgtgtgcagcgccagcagcgccagcggcgccacggtcatcgccaccgccagccagacaaaaaaggcgtacccgcccatggcgaaaaaatcgctccacgatgaaaatgccggactcaccggtgcccccttttcagtatcagttcgctcacccacgggcggcgtttttccatcagtaaaatcaggttgcgcatccgcatcagcgaaagcgtcataaagagcagcaggtagccggcgatggcccagcgcagcggcgagcgcatcgccgggtcgatactctgctgcatccgcgtcgagccctggtgcagggtgttccaccactcgacggaatagtggataaccggcaggttcaccacgccgaccagcaccagaatgcccgccgcgcgcccggccattttacggtcgtcaaaggcgtgccacagggcgatgaccccggcgtagagaaacagcagcaccagctccgaggtcaggcgcgcgtcccacacccaccaggtgccccacatcggtttgccccacgccgcgccggtgaccagcgcgatgaaggtgtacaccgcccccaccggcgccatcgccgcgacggcaaggctggccattttcatctgccagaccagcccggtgaacgccgccaccgccatcgccgcatagatacccatcgaccagatggccgccgggacatgcaggtacataatgcggtagccctccccctgctggtagtccgccggggcgaaaccaaagccccggacccagcccgtggccagcacaatgatgccggccgccgccagccacggcacgagcctgccgcaaatctgatacagccggggcggcgccgccagctgatgaagggttttccacatagtcgtcacctgacctcctgaaaccagtaaaatgtccgtcgcgccggggcgctactgcacgctgaggcgcagcgccgccgcggtggcgaacgggcttaacgtcgcgctgcccgccagcagcgctcccagcaccgccagatagccgtcagcgggtaaatgcatcgatgccgcgtccatcgccgcggcggcgaaaatcagcaccgggacactcagcggcagcaccagaatgcccagcaggacgccgccgcgccgcagcccggccgtcagcgcaacgcccggcgcggcgagaaaccccagcgccggcgtgccgagcagcagcgtcagcgccatgattttccagccgtacacgtccatccccagcagcagcgccaccagcggggagagcataatcagcggcaggccggtcaccgcccagtgggccagcaccttcgccagcaccaccgccggcagcggcaccggcagcagcatcagctgctccaggctgccgtcctgcaggtcgtcgcgaaacagccgctccagcgccagcagcgaggccagcagcgccgccacctggatgatgcccggcgcgatacgcgccagcagctgcggctgcggcccgacgcttaacggaaacagggtgatgaccatcaggaagaaccacagcgggccggcgatgtccgcgccgtggcggaacgccacgcgcagttcgagacagaagacacgccacatcacagcccggcccccccgccggtcagcgccaggcggcggacggtgtccgcggcccccggcagcggctggtgggtggtgagaatgaccatcccgccctgcgccgtgtgcgccgccatccgccgggtgaggcgcgccacgccgttaacgtcaatggcggtgaacggttcgtcgagcacccacagcgcggcgcgggtcagccacaggcgggccagcgccacccggcgctgctgcccggccgagagctgagcgaccggcacgtcctcaaatcccgccagcccggcctgcgccagcgcctccgggagacgcgcgccgtcgccggggtggaagaagtgcaggttctcccgcgccgtcaggcgggttttgatccccggctggtgccctatccacagcagactgcgatggaagctgtcgcgcacgcggcgcaggggttcgccctgccagtacacctccccgccgtccgggcgcgccagcccggtcagcaggcgcagcagggtggtttttccggcgccgttgccgccggtgacctgcacccactccccggcgtccacggtgaacgacagcccgcgaaacagcgtcctctcgtcccgctcgcagtacagatctctggcttcaagcatcattgtcattgcgcatattcaggttgatatggcgtataaacaccggtcaggctttccaggaaggcgacgatatcgtcaatatcgttttgcggcagatcggtgccaacctgataacgcagcatcagttttaccgctccatccagcgtcggtacgtcgccccgatggaaataaggcgctgttaacgcgacgttgcgtaagcccgggactttttgccgtaatttatcgcgaacctctttggtgacgttcatacgaccaatatccgctgcggtaatttcgccaaaattaaagtctcgctttaatcccaatggttcaaaagagcgcccgcctaaaatgataccgccgtgacaggttgcacatttattctctttaaataattgataaccgtgtttctgttgcgcggtcagcgcattttcatctccacgtagccatttatcaaaggcggaatccggcgttatcaacgttttttcgaattcggcgatcgcatcagtaatattttccccggtaaatccttgcggataaaccgcctggaaatcttttttcaggacaggatctttatcaagcttgctaataatttcatcccaggatttagaggccatttcaataggatttaacggtggtcctcctgcttgctcctgcagggttgcagcacgaccatcccaaaattgttcgatattaaatacggagttgaataccgtcggcgcatttattggtcctaccgcaccgccaacgccaattgaggtttttctgccatcgacaccgcccgcatttaacgcgtgacaatgcgcacaggatattgtgctgtcgccggataaacgttcatcatgataaagccggaaacctaagtcgacttttttcgcatcgacgggaatattgcgcggaataggctgaacgggttcattccggtgcgccgggtcggtatcggcgctggcatagttgcgctcacgctgatcggctatccagttcaggatgtcagtacgctctttatcgctgacgccccccgcccagtgcagcgcgacatagcgggttggcggcatagtctgatgttgcataacccattcaattttattcagttcgctttgcggcaccggcgtatccgcaatcagggcggcccgtaccgcctccaggttaaacgacttgtagccgagctggatatcgtaatccattagctgctttgccaccggaaaagaggaataaaaaggcaattcagcggaaggcgtatgacaataatcacatcctttctccctgaaataacccagtattttattattttcacccacaaccgaggcctgcacatcgctttttttactgcgctgtttgtcgtaataccatacatacccggacaaacctaaataacataacagcccaacggtgataactgttgtcgcatagagggtaatttttttcatatcactatccttatggggtattgcggcatgattaattaaattttatttttttactcatgaggcccgtcaatactaaatacaaacccatcatggatattgattggtatcaataattacaattggctaaacctatagatatgataacccccgactatcgtaagatttattttgcgatgtccgtcacagggtttattcagcagcaacaatggataaatcctcttttccgtcatcaaaacgaacgatagccaacaataattgacttaacgcagcataaaagccatagggatcatgcttaaggcaattatttgtaaattccggaagccattccagtaatgacgacaatgttttctggcgtaatttattcattctccgttgttggaacgattcacccaatgaaaaatgtaaatggctgagtaattccagataaatcgccaggtggtcggtcggctctttaaaatcgtcgttgacttccatcccggcttcaagcaataaatgtttaatcatgccgggttcctgctgcgggtattgcgaggcgtagggcaaggccgattttttatccgtcatcaggaacaatccgcaaaaatctgcggccagctccagctgcgcatcctggcgcaggctaagcgcggcaattttttgttcgagtaacgccaccgacgccgccagcgcaggctgacgctttaacagcgccagccagtccgcgatctccgcggactgtaattgtattaacccttcatcatccacttcccggaaaaagagtaacgccagccatgcatatacgcaggcgtactgttcctgagcaagcgctggctgcttaatcatgcggattcccctgcgatgcgggtacatattcacactgcgcgaccatctcgaccggaccgttaaacgccgtgacgttatccatagggccggtatatttttcaatttccaccagcgtcgtatgcgcgctggtcgcctgcgcaagctgtgatgtaccgatatccagcgttaatacgttagggttgccgtacttacacaacgcgttgagatcgccgcctttatcaggatcgtaccaggcgccttcatgaattcgcgccacgcccggcgcatagcgatcggaaactaccgctcccgccagtacctgcccgcgtgcattgaatacccgcacgatgtcaccgttgcggatcccgcgcgcgctggcatcctgtgggttaataaagaccggctccttgccgccaacggcatattgctgacgcagcgtttccgactcgcacagttgggaatgcagacggaaatcagggtggacggattgtaagtgcagcggccagcgctgcgatcccggcccgccatgcgagcgttcgattttttcgaaccacatgggatggccctgacaatcgtcgtattgcatgtcggcgatggttttggagtaaatctcgatcaaaccgcttggcgtgcccaacggctccaggtccggatcttcacggaaagcctgatggcgtacaaacatctgcggatgatcaaactcgatgtactcctgttgattccagaacacctcgaaaatcggtaagtggataccgcgaccttttccctgctggctcccttcctgccagatgcgtttcagccagcccatttcatcaagaccttccgtgaatgccgcttcacggttaaagcgtcggcagagatcgcggaaaatatcaaagtcgttacgcgcttcaaactgcggcgacaccacctgtttcatggcgataatgccgcggttagagtggttgccgaactgatcgaggtcgttacgctcaaattgggtggtagccggcaaaacgatatccgcaaagcggcaggtcgacgtccactggttatcaatggcgatgaccgtttccagcttgcgccagccttcaattatgcggttaatttgttggtgtcggtggaacgggttggtcccggcgaacacgcacatcttcagcggcggtaatttaaccgatttgccgttccagttaatgatcttgcccggttcaagaatggcatccataaaacgcgcaataggaatggtgctgctgtagcctttgtaatccgtgctgtcgtgcactggcggaacggtcgtcgaaccggaaaagccgcttaaaatgatccctttacgaccaggcgtcccggcgccgttatagtgccagccaaaaccaaagccgccgcccggtaaaccaatctgtcccagcattgccgccagcacgacgaccatccatgaccactgttcgccatgctgcatacgttgtacgcaccagccagcgatgatttgcgttctgtcgcccgccatctgccgcgccaacgcgcggatggtgtcggcgtcaataccgcacagtttttccgcccaggcggcatctttgggctgtccatctttctcgcccagcaaataggggaggaactggtcaaaaccgacgcagtagttatcgaggaaatttttatcgtacagtttctcgctgtacagggtatgcgccagcgccagttgtaacgggacatccgtctgcgggttaatggcgatatgtttgaccttatcgcgccccagataatcgtgcgtggaggtgacgaccgggtcgatgctgatgaccgagatagcgccgctggcaaccttctcttttaattgttcatagtactgatagacatcgtgatccgggcaccaccagtttgcctgctggtttttcaccatatcagaaccccatagcacaatcgttttactgttctgtaaaaccagaggccatgacgtttgctgctcgtacacttccattgaacccaccacgcgcggcagaatcacctgcgccgcgccggtcgaatagtcccctcccgtgctaacgctattgccatgtagcgcaatcgcgcgcgccagcatcccggaggcgttatggaacatgccggtagattgccaaccgctcgccgtcagtagcgcgctcggcccgtaggttttttgcacccgctccagttcctgatagaacagatccagcgcttcatcccaggagacgcgcacaaaacgattatcgccgcgctgcgaggtgtcgctttgatgacctttgcgcatccagtcgacgcgcaccatcggatagcgaatacgcgccgcgttgtggacgtgatcgggcaggccggcgatcattttggacgggtatttatcctgttcaaacggttttgccgccacaaatcgaccgtcaaccaccgtggcgcgaatcgccccccagtgagaaccggtaaggataccctctttcgtcgcggcgcctggcgcaacggcatccgctgcgcgggcgctacggggcgtcagtagtgacggccccagcattcctgccaccgtcaagccgccaagctgcgccagaaaacgtcgacgagagacgtgtaacgagtccttatttttcattgtgttctcccttatcgctgtgcggcgtgttggtggtatcagacgcattcatctggagatatttcaacaaggtacgttcttcacgcttatccagactggtgaaaccgatcatgccgttgagcgtgccgatccagccgttagcgtcaaagtgcgctttgtccggcgcgccgtgacactgattacaggtgccgttatagagggagtcggcataggcccaaatcggtttaatgtcatttaccatgtcgcctttttgcatccacgcagttgcctgtaatttgctccactgagtattggtcgccgcgacggtggtctcttccagcgttttcacatgctgttgcacatcgccgcgaatcgaggcgacaaaaatacgtttaccgggcaactgcgtcagcacgcgctggcgaccgtccgtctccgtccagccttcgatttgcacttgcagccagtcaccgtcccgtttaaggactttcacttcagaagcaggtaacagcgaacctgccggttctttatcgcctttagcggcgtaaatcggcttgatatccagcgaatagagcgtatcgccgtcattatgcgtactggcgctggcgcgcagttcatcaaactgtttgcggaaaccgctgctcatatccggtagctggtgggcaatccctttatggcagtcgatgcaggattgattttctttcgcggcgattttcatttgccgcgccgcttccgggttctgtttcgcgtgatccatcgcatcgtagttatggcaggaacgacaggtcgcggagttattctctttcatgcgcgcccattcacgctcggcaagctcggcgcgtttggcttcaaatttttccggggtatcaatcgagtgggcgataaatgtctggtaaagatcgttgctggcttccagcttacgtttcaccatgcctggaatatcaggggggatatggcaatcgtggcattccgcgcgtacgccggaagcgttctggaaatgtacggactgtttatattcctgatacaccggctgcatactatggcagctgacgcaaaactctgtcgtactggtcagtttgataccgacgtgaggtaacacgatcagcgcaacgccgatcacaatcccgacaatgaccagcgccagtatcgaccaacgggcgcttggcctgagtagcgctctccagagttttcgcataatagcccctgtaattatatggtttaatgcgcagatcttattccgcaaatatgaacagcgtcactggtcaggatgaacgggatacggcaatatatgaacagatatgaacagaaagagaccgcgcgcaggatgtcacatcacattgttattgttgaggatgaacctgttactcaggccagattacaggcctattttgagcaggaggggtatcgcgtttcggtgaccgacagcggcgcgggcctgcgtgacatcatggagcatgagcacgtttcgctgatcctgctggatatcaacctccccgatgaaaacgggttgatgctgaccagggcgctacgcgaacgttccacggtgggcattattctggtgacggggcgttgcgaccaaatcgaccgcatcgtcgggctggagatgggcgcggacgactacgtcaccaagccgctggaactgcgcgagctggtagtgcgggtaaaaaatcttttgtggcgtatcgatctggcccgccccacgccgcaaaatgccagtgaaaactgctatatgttttccggctactgcctgaacgtgatgaatcacacgctggagcacaacggtgaagccattaagcttacgcgcgcggagtacgagctactgctggcctttgtgaccaacccaggcaaagtgctgcatcgcgaacgtctgctgcgaatgctttccgcccgccgcgtagagactccggatctccgcacgattgatgtcctggttcgccgcttacgtcataaaattacgccggaactgctggtcacacagcatggcgaaggctactttttagcctcggaggtgtattgatacagatagacgggccgaaatcccggaggcgatagcgaacggcgaacgcgcgcgctgtcggcgttgttatgcgtcaaaataagcaccggcgggctgatattttcaggcaccggttgcccctgtaagaccttaatcgactgcgttatcgctaattctccctgccaggccatctgatcgctgagcgccatcaggatatggccgcgttttaaaccgcgataaacctgatgcgtcagataaaatgagacgatcgtgagcggagtcgtcaaattacgcccttcgcccatcgccgcctccgccgctatcgccgacccggcgaccacattggcgtccggatggcgttccagcatttcctggagtaagtttcgctgcacttcaatgtcgttatcgccccaggcgatatccacaatgttgatggcgctgcctttaattgcctgacgaaaacccgccaccatctcctgactgccgccggcttcttccggccccgggaagagtaaaacgttaagcgcttttcctttgctccactgcaccaggaaacgtcccggcagataacccatctgaaaccacggcagaccgacgtgagttgccacgctggcgtcgcgtatcacgttcgccacttcaataaccggcacattaccggcataccgttccagttccgggaaacgaatggtactgctgccaagcagaatagcgtcggcgccccactcccggcactgcatcatttgctgttgttgcgtcgccagttgccgatagccattcgcttccagcacttttaaatcaacgccatacaatttggccgctttttgcatcccgtagttgacggacaaccagtaagaatctttcaggctggggtataatgcgcacagtttccagggtttactcgcattgactgacgtttgccgccagggaatcgcccgatcggcgcgcgtccagtgtagcagtccggtttcggctgacgccgtttctatattcgagacgatgattatcaaaaaaaagaacgaaataagcgcgcgcatgatagccccaccagcaacaaggttttatcctaatggtttttccggcggcaactcaacccatttcacccgcggcgcataaatgtcaacgccttcactgacccgcagattatggctggccttcgccctgatggcggcgctcaccctgctcagcaccgtgatcggctggataagcctgcgcgtcattagtcaggtggagcaaaccaatacgcaagcgctgctccccacgatgaatatggccaggcagttaagcgaagccagcgcttacgagctcttttccgcgcaaaatctgaccaatgccgacagtgagggcgtttggctggcgcaggggaagatgctgaaagcgcaaagccttaaaattaaccatcttttgcaggcattaagcgagcaggggtttaatacctcggccatcgcccggcaagaaaaagagattgcacaaacgcttgggcaacagggaacgctggtcggtgaaattctcacgctgcgcgcacagcaacagcagttaagccgccagattgcggaggcggcggaaagcattgccgcccaggctcacggtcaggccaataatgcagcgacatctgcaggcgccacccaggccggtatttacgatcttatcgaaagcggtaaaggggatcaggctgaacgcgcgcttgaccgactgattgatatcgaccttgagtatgtgaatcagatgaatgagttgcgggtcaatgccctgcggtttaagcagctcattgtgaccttaaaagacgcgcaagggctgagcgatgccgaagacaccgatgaaaaacttaatcagttggttaaaattttatcccgccgccagcagcgtatagaagatcctaccgttcgcgcccaaatcgccgacgcgctggagacaataaaccagtacaccacactggttaccctgtttcgtaaggaaaacgccatccgcgaccagcttcaaacgcttatggccaataacctctttcagtttacccgcttcagtacggaagtgtcgcagttggtgaacgccatcgaaaaacgaaacgaggctgggttagcgcgtcttacacacgccagtcagcgtgggcaaatagggttagtgatcttaggcatcctggcgctgtgctcattaagttttattctttggcgagtggtttaccgctccgtatcccgcccgctggcgcaacaaacgcaggccttacagcggctactggagggcgatattgactcgccatttccggaggcggctggcgtcagcgaactggataccatcagccgtctgatggaagcgtttcgcgccaacgtgcgcaaattgaaccgccatcgtgaggatttggcggaacaggtgcgatcgcaaacggcggaacttcatgcgctggtgctggaacaccggcaggcgcgcgccgaagcggaaaaggccaacgaggcgaaatcgacgttccttgccgccatgagccatgaaattcgcacgccgctttacggcattctcggtacggtacaattgctggccgataaaccgctcatgacaaactaccgcgacgatttacaggccattaatgattcaggcgaatcgctactggcgattcttaacgatattcttgattactcggcgattgaagtaggcggcaccaacgtttccattagcgaggaaccgtttgaaccgcgacaattgttgaatagcgcgctgcatttaatgcacagccgcgttcaggtggcgctcatcaccgactttagcgagcaactcccctcaacgctacaaggcgatccgcgccggatacgtcaaattgtgattaatcttttaagtaatgcggcgaaatttaccgatcgcggcagcatagtgctgcgcacgttttgcgacgatcagagctggtttattgaggttgaagataccggatgcggtattcctgaagcgaagctgacggctattttcaaaccgtttgtgcaggcgacaggacgccggggcgggacgggcctggggctggctatcagcgccagcctggcagaggcgatgggcgggacgctaaccgtcaccagtacgcttcatgttggcagttgttttcgtttacaactgccggtttgccactccaaacccgcaagtaaaagtgcgttcagggaaccgataaatcttaacggactacgcttgttgctgattgaagataatatgctgacgcagcgtattaccgctgaaatgctcacgggcaaaggggtgaaggtctcacttgctgaaagcgcgaatgacgcgctacgctgtttagccgaaggcgagtcctttgatgtcgcgctggtggattttgatttgccggattatgacggcttaaccctggcgcagcagttgatgagcctgtatcccgccatgaaacgcattggttttagcgcacatgtgatagacgataatcttcgtcagcgtaccgccggtcttttctgcgggattattcaaaagcccgttccccgcgaagagctttaccgcatgatagcgcactatttacagggcaaatctcacaacgcgcgggcgatgttgaatgaacatcagcttgccggcgatatggcgtctgtcggcccggaaaaactccggcaatgggtcgcgttattcaaagacagcgcgctgcctttagtcgaggagatcgaggcggcgcgcgccatgaatgacgacgttaacattaagcggctggcgcataaattaaaaagcggctgcgccagcctggggatgacgcaggcaaccgaagcctgtcgggaactggagttgcaaccgcttagcgatatagatattaaaactatcgtgacgcagggagtgacggcgctcgacgcatggatagccggtcatccttcgccataatgacttccggctcgccacggccaacttatccgacgcgtttcacatcgcccactaacaggatgtaagacagcgcgcccagcagggccacaacggagatatagaccagcgccggagcaaaaccgtagctttgcgccagataaccaatcactaacggtacgctaatcccgcctaacccaccgataaagttaaacataccgccggtaaggccaatcaaccgcatcggcgcaagggaagagattaacgaccaggtaatggacgcaaatccgttgccgaagaaagctatcgccatcaacgccataatccacaacggatcgttagtgtagttagcgcccataatgcatgtggagatgagcaaaccgcaaataatcggcgttttgcgcgccacgcccagcgagaagccttttttcaccagtttatccgccagccagccggagagcagtacgccaaaaaaggcagccaggaacggtacggtcgtcataaagcccgcttttagcgcggtaatgcctttttcctgggtcagataattagggaaccaggtcagaaagaaccatagcgtagagtttacggcgaactgaccgaggtagacgcccaccagcttacgatggaacaccagtttccagtcggctttcgtcagcggctggcgggcctcttttttcgctggcgcatcgccatccaccagaccaccgccatcgcgaatatactccaactccgcctggctaaggcttttcgtcaaacgcggcggttgataaaccttaaaccagaccaatgaccagataatcccgataccgccggtgacgataaagacccagtgccagctcagcatttcctgaatccagatcagcagcggcgtaaggaatgccagtccgacgaactgtccggaggtgtagaacccgactgcggatgcgcgctcatgctccggaaaccagctagtgaccatccggttatttgccggaaaggccggcgcctcgaaaatcccggtaatagcgcgcaggccgataagcgacaatagtcccgtcgcaaacccctgcaatagcgttgcgactgaccagccgaagatagcgataaaataggtcagccgggacccaatacggtcgagaaaccagccgccggggatctggcataacgtatagagccaggcaaaagcggagaagacatagcccatttccgctttggtaatgccgaattctttttgaatatgcatggaagctacggcaaggttggcgcgatcgacgtagcaaatcaccacggtaataaagatcatcaccagcgtcagatagcggcgacgccccggctgtgctgctgtaactgaaatatccatcgtcatctgtctccagattctgggcatagcgaggccgctcaccatgccctgtaaattacagagggtgtgtttttatatttaaattgggttgcccggagggcgacgtttgttgagcctacagcgtggcgatcaccactcggctaccgatccgtcagcgtgccgccacaacggattacgccagtccggcgcgcttttgctaagttcaatcaccctggcctcgtcaatgtctacgccaagacccggtttggttaagggtttaaagaagccgccgtccatgctgaagtcttctttatttttcacaaagtcgagcagctccgcgcccttgttatagtgaatgcccatactctgttcctggaataccgcgttgcgcgaaacaaaatcgatatgcaggcaggcagccagggcgattggacccagcgggcaatgcggcgccagcgccacatcatatgcttccgccattccggcgattttatagcattcggtaatgccgcccgcgtgggataaatccggctgtagaatcgccagcccacccgcgtccagcacgcgtttaaattcaaaacgcgagaacatacgttcgcctgcggcaatcggaatatgcgtttgcgctgccaggcgcggataatattccgcctgttccgccagcaccggctcttcaataaacagcggacgatagggttccagttctttaatcagcaccttcgccatcggcgcgctaacgcgaccgtggaaatcgagcccaaactcaatttcactgccgaaagcttcgcggatttgcgccacggtattgaccgccgcatccaccgcacgggagttatcaatcacgcccatctcttcacagccgttcagcttgaaggtgtcaaaaccaataccgcgcaatttttcaataccgtcaatgacgtctgccggacgatcgccgcccacccagctataggccttgattttgtcgcgcaccaggccgcccatgagctgccagaccggcgcattcaacaccttgcctttgatatcccacaatgcctggtcaataccggcgatggcgctcatcataatcgggccgccgcgataaaaaccggcccggtacattacctgccacaggtcgttgatacgcgccggatctttccctatcaggtagtcggcaaactcatgtactgccgcctctacagtacgtgcccgaccttcaatgaccggctctccccagccaaccacgccttcatccgtttcgattttcaggaacatccaacgtggaggtaaacggtacgtggtgatgtgagttattttcatttcactgcctctcgatacgcattaacaaatgccgcagcctgctgcgcggtgcgttcaacggattgcccggcgcgatagagatcgctacccaatcccgcgcccacacagcctgctttaatccattgcgctaggttttccggcgtcacgccgccgacggcaaatagcggaacatccggcggaagtaccgctttcagcgcgctgatgtagcccggaccaaacgccgacgacgggaaaatttttaacgcctgtgcgcctgcatccagcgcagaaaaggcttccgttgccgtggcgcagcccggacacacggtcatgccatagctcaccgcccggcggatcacctccggttggatattcggcgtgacgatcagcttgcagcccatcccggcaagctggtctacctgttccggtttcagtacggtaccagcgccaataagcgccctgccgccatacgccttcaccacggaagaaatgcttttttcccactgtggggagttaagcggaatttctatagcgtcaaatcccgcatccaccaccgcgccaacgtgcgccagggcatcatcgggcgtaataccgcgtaagatagcgatgagagggagattagtttgccactgcatgagcgatgctccttattccagcctgaaatgccatatcgccatccacggttgaaacatcacgcccaatagcactaaacgcctgttggtaacgtgagatcagcgcgggtccagcgacgagagtgatagcctgttgcgccgcgaaggattcgctcatgctggcgacttccgcgccaatcaacaggccggagaggaagtcgctgacctgctcacgcgcaagatgtcccaacacgtgcgaggcgcgaacctcaaaaagagaaggcaggacggcaggagaattaagaccgcgctccagccccgcggcataggcgtcgccagaaacttcctgttccggcaaaccagccccgaccagcgagtgacgcagcaacaagtgatggagttcgcctgtcatcacagtacgaaaatcatgaatttgttgcgtatcagtctgtacccatttgcaatgtgtgccgggcatgacatagacagaagaaggagaaagttcgcaggcgccaagcagttgcgtctcttcgccgcgcatcacgttgtggttatcctcgcgtgagacacacaatccggggatgatccagatgttgtcgccaacggcggttaactgttcgccaatagcggagaacagggcgggaaccggcagataaggcgcattttgccagcctacgttactgccgatcatgcccgccattaccacgggggtggcgctgtcgcgccagtgtgttgtgacttctgctaacaccgcgtcaggagatttaccgttcaggcgtgtaacgcctgcttctgattgcctgctctccaggcatttgtcgccctggtaaagccaggcgcgcagattggtcgatccccagtcaattgcgatgtagcgagctgtcatgtgatttcctttaaccttcgtgtcgagctggcgatcatggttaatgccgcctgctctgccgcatcgccatcctgatgccgtatcgcatcgaatagcgccttatgttcctggagcgttttcggcatgttggccgcatcgcccatccaggtccgttcaaataccgctcgctgtagcgagctgatcgctacatttaactgttgcagcaccgggttatgcaccgactgcaacactgcttcgtgatagcgaatatccgcctcgttaaacgcttcccggtcctggttattggcaatcatgtcgtttagcgccgactcaatttcagccagatcgcttgatgttgcccgttccgccgcccagcgtgctattgctggctccaccaggtttcgtatttcgctcatcgcgctgataagcctcgggtcgtagtcgttttccagcacccattgcagcacgtcggtatcgagataattccactggttacgcggtgcgataaacgcgccgcgataacgcttcatttcaattagccgcttcgccataagcgagcgaaacacttcgcgaatgatgttgcgcgacgtttcaaactcctcgcacagatccgcttccgctggcagcgccgaaccgggtacgtatttaccgctgacaatctgtttgcccagcgtgataacgatgcgatcggttttattgagagtcatagagagtccttgtgctcgatgtgaactctcttactttaccgcgatagctgaattacgccgcaattttgtagtactagcgtgatatcaaccgtcgttatcatgccattaatgtagtacaacacaattatgttgtactacaatttagatcacaaaaacgacaattggttatgggaacgttataagacgtaaacgaaagacataaaaaaacccgcagcaagtgcgggtcgttaagcgagtatttgcccgatggcgactatgccttatcgggcggggaaatggccggatgagtgatcggggttcagcacaaatttttcaatcgcccaggcaacaccatcttcaaggttcgatttagtcacaaagttagccacctctttgaccgacggaatggcgttgtccattgccacgcccataccggcgtattcgatcatcgcaatgtcgttttcctgatcgccaatcgccatcacctcctctggcttaatacccagcgcctcgaccagtgattttacgccagtgcctttattaacccgtttatcgaggatttcaaggaaatacggcgcacttttcagcacggtgtacttttccttcacctctgccggtatacgcgcaatcgcccggtcgagaacggcaggctcatcgatcatcataactttcaggaactgggtgttcgggtccatcttctccgcttcacaaaataccagcggaatggtcgccacatacgattcatgcaccgtgtagtagctgatatcgcggttagcggtataaagcgtatttcggtctaatgcgtggaagtgagaacccacctcacgggacagtttttccaggtaacggtagtcatcatagctgagcgccgtttgcgcaaccgtactgccgtcccctgctttctgcaccagcgccccgttataggtgatgcaataatcaccgggctgttccatgtgaagttctttcaggtaactgtgcacacccgcatacggacggcctgtggtcagcaccacgtttacccctttttcacgcgcagcggcaatcgcgtttttaaccgccggagaaatggtgtgatcgggcagcagaagggtgccatccatgtcgatagcaatgagtttaatagccatgaaatccccgcattaaatgagtcctgactcatgctaacgcgattccgctcaaaaaacagtaaagaatccgagagaaagggggataagattcacaaacgggattccccttttcaggccgtattctctcctcctgatgtattagataacctcattaatcaaacagaaaataccgtttttctaaaagaatgcgtattgctactttggacatcatcacttagagcctaatgggattggttcttaatcagtaaaaatcaacaaaaacttatattttaaaataaccttatccgatgagaaggagatcgctaatgtcgatggcccttaccgcccccccaaccaggaaaagatttttaatcgttgcctgtctgtttattggaatatttattgcttatctcgatcgcgttaatgtttcggtattagccgcgaatgaacccttcttagcctatatgggtattgaaggcatgcccttgcaaatcggcatgatgatgaccgtctttctggccgcttatggtatcgctaacgttgtattatcaccgcttggtgattatctcggccccagaaaagcgatgatgctttgtattctgatctggactatcgctttaatgattggcggagtcgctacatcattcgctctaattattatttgccgtatattactgggcatcggagagggattttattatccactgcaaagcgtatttattaaaaactggttcccgaagcaggaacgcggcagagcaaacgcggcgtggatcgtcggccagtcagtcgctcccgccattgcgatgccttttttcacctggtggataggcacccacggctggcgctccaacttctttttatgcgccgctcttgggttaatcccactctggctactttggcgatatgttgctgataaaccagaacaacataaaagtatcagcgagcaggaactggcttatatcaaagccgggcaggaaacggaaagcgcaggcagcagcgaaagttttatgttgcgggtcaaaccggtgattaccaactacagctattggctgctggtgctgtggtatctgtgtctgcaatgtttatattggggaatgattacctggctgccgacctatctaaaatcagccagagggttcagttgggcggaaatgggctggctggcgtcgcttccctttgtcctgtcgatatttgccaaagcggccgcaggcgtcttcgtcgataaaataggacgcagcgcccccatattaatggtattaatgtttttcgctggcgtcagtatctatttcggcaccataaccgaacataaatatatgtcggcggtactcctctcctttgctgttgctttctgtacgatgggtacgcccgttgcctggacgttattacagggaatgataccaggaaaatccatatccgccgccagcggcgtaatgaacggcgtcgccaacggactctcttcattatctcctgtatttatcggcttatttatttctatcactggaacttataccggcggcttactatgcctggtttttatcagcgctatcgccgtggtatcggcattaatcttaacgattaaaaaatattaattacgaggagtaaatgatgaaaattaccagcgttgatattattgatgtggcgaacgattttgcgtccgccaccagcaaatggcgtccggtggtggtaaaaattaataccgatgagggcatttccggttttggcgaagttgggctggcttacggcgtcggcgcttctgcgggcatcggaatggcgaaggacctgtcggccattatcatcggcatggacccgatgaataacgaagctatctgggaaaaaatgctcaaaaaaaccttctgggggcagggcggcggcggcatcttttccgctgcgatgagcggcatcgatatcgcgctgtgggatatcaaaggcaaagcgtggggcgtgccgctgtataaaatgcttggcggcaaaagtcgcgagaaaataagaacctacgccagtcagctacagtttggttggggggacggcagcgataaagatatgctgaccgagccggagcagtatgcacaggcggcgctgaccgccgtcagcgaaggctatgacgcaataaaagtggataccgtcgcaatggatcgccacggcaactggaaccagcaaaacctcaacgggcctctcaccgataaaatcctgcgtctgggctacgaccgtatggccgccattcgcgatgcagtcggcccggacgtggatatcatcgccgaaatgcatgcctttacggataccacctcggcgattcagtttggccgcatgatcgaagaactgggcatcttctactacgaagagccggtcatgccgttgaaccccgcgcagatgaagcaggttgccgataaggtcaatattccgctggcggctggcgaacgcatttactggcgctggggataccgtcctttcctggaaaacggcagcctgagcgtgatccagcccgatatttgtacctgcggcggcatcaccgaagtgaagaaaatctgcgatatggcgcatgtttatgacaaaacggtgcaaatccacgtttgcggcgggccgatttccacagcggtggcgctgcatatggaaaccgcaatccctaacttcgtcatccacgaactgcaccggtatgcgctgctggagccgaatacacagacctgtaaatacaactacctgccgaagaacggcatgtacgaagtcccggagcttcccggcatcggccaggaactgaccgaagaaaccatgaaaaaatcaccaaccatcaccgtaaaataagccaactgtctgcctgcgccgcaggcagacaccctgtatttgcgagtcgtatcaacgcgaccttatccagcctgagataaaatcctctcagtaaaggggtaacacaggtggcaaatgaatttaactatccggcaatttcgcgcgtttctggccgtcgcggatttgcgtagttttaccgccgccagcaaatatctgtgcatcacgcagggagctgttagcggtttaatcaacgaaatggaaagccagatggaggtttcccttttcgaccgcacttcgcgcgtggtgaagctatcgcccgacggcgaaaagtttttacccgccgccatgcgggttgttgaagagtttcaacgggccgaaaattatgcccgcgacctgaaagagatcaaaaaatccctggtgcgggttgttggcgcgccgctgatcgcctgtgcttttctgccgcaaatcatccatgcctttaagcggcagcatccgcatacccacgtacagcttattgataagcccatgtcgcaattacaaaaaagcattatgttgggagaagccgattttggtatcggcccggagcggccgctggaaccggaaatcgacaaacaaacgctgttcacaacggaaatcgccctgtactgccatccggactatcggctgcataaaaaaacggttcgctgggaagagattcaaagcgaagagctgatcgccgttggcaacgaatccattccgatgatctccgcaaccgctggcgtgcgcattaagcccaaaatgacggtggaacatatggcgaccgccatgtcgctggcggcgcagtgtgaaggcgtggtgatcgccggaaccttttcccgccattacgccaaaagctaccaattagcgacctgttcgctcacgcctccgctgcggcgcaatatgaacctttatttccatgcgtggcgcgcacaaacgcccgccactcagcgctttagagattttttattcagctatgtcgatgaacatcatgatgccccggccaaccagcggtaggccggggattaaggcaggttaaatatcgatattcgctgctttcagggcgttctcctcgataaaggcacgacgcggctcaacggcatcacccatcagcgtagtgaacagctggtcggcagcaattgcatctttgacggtcacgcgcagcatacggcggctttccgggtccatggtggtttcccacagctgatccgggttcatttcacccagacctttataacgctggatagccagaccgcgacgtgattctttcaccagccactccagcgcctgctcgaagctggttaccggctggcgacgctcgccgcgttcgataaacgcgtcctcttcaatcagaccacgcagcttctcgcccagcgtgcagatacgacgatattccgcgccggtcacaaactcgtgatccaacggataatcggtatccacgccatgcgtacgcacgcgaacgatcggctcgaacagattctgttccgtattagtatgaacatcgaacttccactgactgccgtgctgctctttctcgttcagctcggtaatcagcgcattcacccagcgcgttacagtctgctcatcagaaagatcggcttcggtcagagttggctgatacaccagctctttgagcagcgctttcgggaagcgacgctccatacgaccaatcattttctgcgtggcgttatattcagagaccagtttttctaacgcttcgccggatagcgccggcgcatgagcgttcgcgtgcagagtcgcaccgtcaagcgcgatggaaatctggtactgatccatcgcttcgtcgtctttaatgtactgttcctgcttacctttcttcactttgtacagcggcggctgcgcaatgtagacgtggccacgctcgacaatttccggcatctgacgatagaagaaggtcaacagcagcgtacggatgtgcgagccgtcgacgtccgcatcggtcatgatgatgatgctgtgatagcgcagcttgtccgggttgtactcgtcgcgaccgataccgcagcccagcgcggtgatcagcgtcgccacttcctgggaggaaagcatcttgtcgaagcgcgctttctcgacgttaaggattttacctttcagcggcagaatcgcctggttcttgcggttacgcccctgcttcgcagagccgcccgcggagtccccttccaccaggtacagttcggacagcgccgggtcgcgttcctgacagtccgccagtttgcccggcagaccggctaaatcgagcgcgcctttacgacgggtcatttcacgggcgcgacgcgccgcttcacgcgcacgcgcggcgtcgataattttgccgacgacgattttcgcgtcagatgggttttccagcaggtattcgctcagcagttcgttcatctgctgttctaccgccgatttcacctcggaagagaccagcttatctttggtctgtgaggagaatttcggatccggtacttttacggaaaccaccgcaatcagaccttcacgggcatcgtcgccggtggcgctgactttggcttttttgctgtagccttctttgtccatgtaggcgttcagcgtacgggtcatcgccgcacggaagcctgcaaggtgagtaccgccgtcgcgctgcggaatgttgttggtaaagcagtagatgttttcctggaaaccatcgttccactgcagcgctacttccacgccgataccgtctttttcggtggagaaatagaagatattcgggtggatcggcgttttattcttgttcagatattcaacaaacgccttgatgccgccttcgtagtggaaatgatcttctttgccatcgcgcttgtcgcgcaggcggatggagacgcctgagttcaggaatgacagttcacgcaggcgtttcgccaggatctcatattcaaattcagtgacgttggtgaaggtttcgtggctcggccagaaacgtaccatcgtgccggttttatcggtatcgccagtgacggccaggggtgcctgcggcacgccgtgctcgtagatctgacggtgaattttgccatctcgctggataaccagttccagtttttgcgacagagcgttgactaccgagacgcccacgccgtgcagaccgccggagactttataggagttatcgtcaaatttaccgcccgcgtgcagaacggtcatgatcacttccgccgccgagacgccttcttccgggtgaatcccggtcggaatgccacggccatcatccgttacggacacggagttatcggcgtgaatagtcacgacgatatctttacagtgacctgcgagcgcttcgtcgatagcgttatctaccacctcgaataccatgtggtgcagaccggtgccgtcatccgtgtcgccgatatacatacccgggcgcttacgcaccgcatccagccctttcaggactttgatactggaggagtcataagaattcgacatcaacgtttctcgctcatttaatcttgggttaatccgttattttacccttttccacggtaaacatcttcgaattttcatccgacatgtctataacgtgttcagcgctaattgcgctgacaaagacctgcgattgcgtggcttttaagcggctggccagcagtccgcgacgcgcatcgtcaagttcagaggcaaaatcatctatcaggtacaggcagcgccgcccgctttcgcgggtgaggaactcgccctgcgccagacgtaaggcgcacatcaataactttagctgcccgcgcgacagggtatcttccaccggcgcgccgtcggcgcgaatgcgaaagtccgctttatgcggcccgtgcgcggtgtaggtcaacatacggtcacgctcaaagcttcgctccagcacgtccgcatagtctgtctctttctcccagccgcgctggaaagagaacgtcagggaaaattcaggtaaaaactgctgacaggtatccgccatgtcctgtgcgatagcgctactgtactccgcccgccaggtactaatttgttccgccagcggaatcagctctttatcccacgggcgcaattgctcataacgactcacctggcgcagcgcggcattacgctgtttcagcaatcgtttcaggttgctccaggcggtgaagaatccggcttcgttgtgaaagcatccccagtcaaggaacgctcttctgtatttggggccgccgttgagtaaagtaaacccctccggcgtaatcaactgcatcggcattaaatgcgccagctccgcgatcttgtgaccgtcggtaccgtcgatacggaccttgctgtcgccctgcttatctttggttaagccaatcgacgtctcacgctcttcgctctgtaatcgcccgtgaagaacaaacgcttcctgctcatgacgaatcacgcggccaggctgcaaactgcgaaacgcccgaccatggccaagcgtatagatagcttccagcacgctggttttgccgctgccgttggcgccaaccaggaagttaaagccgggggataaagcgagatccgcattttctatgttgcggaagtctttgattaaaaggcgcgtcagtgacatatattagtacattcgtccaggggcgtgtgtgtcgcagccagttcgtctaccgccagcgcgcagaaagcggagcgtacacgaagtacgtgagcatttcgagcactgccgggaggcgaaatggcaagtaaaccagccccttttcagattctacagcctcattggcataacaacgtaggcagcactctgtgacgccgcatcctcaatctgtacgctggatacggaatccgtcagcataatgcgcacggtttcgcacttcagcgcattgagcacgtccagcacgtaactgacgttaaagccgatttccatctccgtcccgccgtagctcacgtccagaatctcttccgcttcttcctgttccgggttattggcggtgattttgagctgattctcactgacgtacagacgcacgccgcggaatttctcattcgagaggattgctgcgcgggcaaacgcctgcttgaggatatcgcagcccgcttccagatgtttatccggattcttcggcagaacgcgacggtaatccgggaagcgaccatccaccagcttcgaggtaaagataaagtcgccgacgtgcgcgcggatattattactgccaatctgcacgcgcagcgggttttcgccgccgtcgagcatacgcatcagttcaatcacgcctttacgcggcacaatcaccgagtggctgggtaaagacgcttccagcggcattgagcacaccgccagacggtggccgtcggtcgcgacagtgcgcagttcgctaccttccgtttcaaacagcataccgtttaagtagtagcgcacatcctgatgggccatcgaaaactgggtcgattcaatcaggcgcttcatcgtggcctgcggcagcgtaaattcaacttcgctttgccagtcgtcaagattcgggaaatcggcggcaggcagcgtagacagcgagaagcggctacggccagaacgcaccagcatccgatcgccttccaactgaacggcaatctccgcgccctccggcaggccgcggcagatatcaaagaatttccgcgccggcacggtagtggcgcctggctcatgcggctgagaaagcgtaacgcgcgcgaccatctccatttcaagatcggtgccggtcagagaaagcgtaccgtccgctacctggaggagcaggttaccgagaatcggcagcgtaggacggccgcccagcgggccgctgacctgctgaagcggttttaataaatgttcacgttcaacggtaaatttcataggatcacgacgacaatgttctgattaaattcgaaaaatcttctttgatatcgtggctttcttcacgcagttgctcaattttacgacaggcatgaagtacggtagtgtggtcgcgcccgccaaacgcatcgccgatttccggcagactgtggttggtgagctcttttgccagcgccatagccatctggcgcggacgtgctaccgagcgagatcgacgcttagaaagcagatccgcaattttgattttgtaatactcggccaccgtcttctgaatattgtcgatggtgaccagtttttcctgcaacgccagtaaatcgcgcagcgcttcgcgcacaaagtcgatagtaatcgcccggccggtaaagttggcattggcaatcacccggttcaacgcgccttccagttcacgcacgttagagcgtagacgtttggcgataaagaacgctacttcgcctggcagacgaatatcattttcgtccgcttttttcatcaggatcgccacgcgggtttccagttctggcggttcgatcgccactgtcagcccccaaccaaagcgggacttgagacgatcctcaacgccgttgatctctttcggatagcgatccgacgtcaaaatgatctgctgattgccttccagcagagcgttaaaggtatggaaaaactcttcctgggatcgttctttattggcgaagaattgaatatcgtcgatcagcaatgcgtcaacggagcggtagtagcgtttaaactcttcgatggcgttattttgcagggcttttaccatgtcctgcacaaagcgctcggagtgcatatacacgactttcgcgttgggtttacgcgccataatgccgttacccaccgcgtgcagcaggtgagttttacccagaccggtgccgccatagaggaataacgggttataagcgccgccaggattatccgccacctgacgtgccgccgcgcgcgccagttggttggatttaccttcgacgaagttatcaaatgtatgttttacattgacgttggagcggtaggtcggctccgctggcgctggtacgttatcccagcccgaacgggccgcaggcgctacgcgctgcggctgcgccgttgttgtctgcgcaggcgcgacaacgttatgcacaggcgtttttagcgtttgcgtaacgggctttgttcccacttcaaaacgcagttgtggggcatccgcgccgcagaatgtgttgagtaatccattgatattgttgaggtacttatctcttacccaatcgagcacaaaacggtttggcgcatacaaagccagcgtgttatcgctcagttccgcctgcaacgggcgtatccacatactgaattctgtggctggtaactcatcctgcaatcgggcaagacactgctgccaaagcgaaagtgacacggcggactccactcgaacaaaagtcgataaatgacaaaggctgatacattaatgattgttggcgcacgtcgataagaccctgcatgaagggtgacgcacgaaccgctgtctgcggttttcacggatctttcaaacgatcgcgacttcacgcagtctgaaaaatttcgtgttcatgcctgaccaggatcgtttgaaacgatcaggaccgcggatcatagcctaaactgagcaagagatcttctgtttctcacagattcttccctatttatccacaggactttccaggaaaggataagtgtaatcgatcctggggaactcctgtacgctttcgcgcgcatattgaaaaaattaataggtaaaggtgagcagacgcctaaaagatcgcataaagatccagggcgatccttgcgctttacctggcagtccgtataattctccacccgtcgcgcaatgcccgtcatatggcgtcaacgctgcttattttccgcacaaaaaggcgtggaaaatcgcgggaaaataaggaaagagaattgactccggagtgtacaattattacaatccggcctctttaatcacccacactgtggcgtaagtcgttcaaagtttgttcgggtatacgcaaaagtcagtgaatttattcaagtttaggtagaaatcgccatgaaacgcacttttcaaccgtctgtactgaagcgcaaccgttctcacggcttccgtgctcgtatggctactaaaaatggtcgtcaggttctggcacgtcgtcgtgctaaaggccgcgctcgtctgaccgtttccaagtaataaagctaacccctgagtggttaagctcgcatttcccagggagttacgtttgttaactcccgctcatttcacattcgtcttccagcaacctcaacgggctggcacgccgcaaatcaccatcctcggccgcctgaattcgctggggcatccccgtatcggtcttaccgtcgccaagaaaaacgttcgacgtgcgcatgaacgcaaccggattaaacgtctgacgcgtgaaagcttccgtctgcgccagcatgaacttcctgcaatggatttcgtggtggtggcgaaaaaaggggttgccgacctcgataaccgtgctctctcggaagcgttggaaaaattatggcgccgccactgtcgcctggctcgcgggtcctgatagcccttattcgggtctatcaacgcctgatcagtccgctgcttgggccgcattgtcgtttcacgccaacgtgctcaagctacggaattgaggcattgcgcaggtttggagtgataaaaggcagttggttgacggtgaaacgcgtattaaaatgccaccctttacaccctggtggtgacgatcccgtcccgcccggaccatttgataccagagaacactaacgatggattcgcaacgcaatcttttagtcatcgctttgctgttcgtgtctttcatgatctggcaagcctgggagcaggataaaaatccgcaacctcagactcaacagaccacgcagacaacgaccaccgcagcgggtagcgccgccgaccagggcgtaccagccagtggccaggggaaaatgattacggtgaaaaccgatgtgcttgatttgactatcaacacccgtggtggtgatgtcgagcaggccttgctcccggcttacccgaaagaactgggttccaacgaaccgttccagctgctggaaaccaccccgcagtttatctatcaggcgcaaagcggcctgacaggccgcgacggcccggataacccggcgaacggcccgcgtccgctgtacaacgtcgagaaagaggcgtttgtactggccgacggtcagaacgaactgcaggttccgatgacttatactgacgccgcaggcaacacgtttaccaaaacgtttgtctttaagcgtggcgattatgcggttaacgtgaactatagcgtgcagaacgccggcgaaaaaccgctggaagtctccacctttggtcagttaaaacaatccgtcaacctgcctcctcatcgcgacaccggcagcagcaactttgcgctgcatacattccgcggcgcagcgtactccacgccggatgagaagtatgagaaatacaaattcgacactattgccgataacgaaaacctcaacgtcagctccaaaggcggttgggtggcaatgttgcagcagtatttcgctaccgcatggattccgcgtaacgacggcaccaacaatttctacaccgccaatctgggcaacggcattgtcgctatcggctataaagcgcagccggtactggtacagccaggccagactggcgcgatgaccagcaccctgtgggtcggcccggaaattcaggataaaatggcggctgttgcaccgcacctggatttgaccgtggactacggctggttgtggttcatctctcagccgctgttcaagttgctgaagtggatccacagctttgtgggcaactggggcttctccattatcatcattacctttatcgttcgcggtatcatgtacccgctgaccaaagcgcagtacacgtcaatggcgaagatgcgtatgctgcagccgaaaattcaggcgatgcgcgaacgtcttggcgatgataaacagcgccaaagccaggagatgatggccctgtacaaagcggagaaggttaacccgctgggcggctgcttcccgctgatcatccagatgcctatcttcctggcgttgtactacatgctgatgggttccattgaactgcgtcatgcgccgttcgctctgtggattcatgacctgtccgcacaggacccgtactacattctgccgatcctgatgggcgtaacgatgttcttcattcagaagatgtcgccgaccaccgtgaccgacccgatgcagcagaagatcatgacctttatgccggtcatctttacggtgttcttcctgtggttcccgtcaggtctggtgctgtactatatcgtcagcaacctggtcaccatcattcagcagcagctgatttaccgtggtctggagaagcgtggcctgcatagccgcgagaagaaaaaatcctgattcggtgtaggccggataaggcgaagccgccatccggcaaggcgcgccggtcagcctgatggcgctaacgcttatcaggcctacaatcaaaaggcggtcatatgaccgcctttttttattgcaacaaagttgagactaaccatgagccataacgacactatcgtcgcccaggcaaccccaccgggacgcggtggcgtgggtatcctgcgtatttccggtctgaaggcgcgcgacgttgcgcaagaggtgctgggcaagctgccgaagccgcgctatgccgactacctgccgtttaaagatgttgacggcagcgcgctggatcagggtattgcgctgtggttccccggcccgaactccttcaccggtgaagatgtgctggagctacaagggcacggcggtccggtgattctggacctgctgttaaaacgtatcctgacgcttccaggcgtgcgcattgcccgaccgggcgagttctccgagcgagcgttcctcaacgataagctcgatttagcccaggcggaagccattgccgacctgatcgatgccagttccgaacaggcggcgcgttcggcgctaaactcgttacagggggcattttccgcccgcgttaaccaccttgtggaagcacttactcacctgcgaatctacgtcgaagcggctattgattttccggatgaggagatcgactttctctctgacggcaaaatcgaagcgcagctcaatggcgtcatcgccgatcttgacgccgtgcgcaccgaagcgcgccagggcagcctgctgcgcgaagggatgaaggtagtgattgccggacgcccgaatgccgggaaatccagcctgctgaatgcgctggcaggccgtgaagcggccattgtcaccgatatcgccggtaccacgcgcgacgtgttgcgcgagcatatccacatcgacgggatgccgctgcatatcatcgataccgccggactgcgcgacgccagcgacgaagttgagcgtatcggcatcgaacgcgcctggcaggagattgaacaggccgatcgcgtgctgtttatggtggatggcaccacgacggacgccgttgaccctgccgacatctggccggactttatcgcccgtctgcccaaaaatctaccgattaccgtggtacgtaacaaggcggatatcaccggcgaaacgttgggtattagtgaagtaaacggtcactcactggttcgcctctcggcgcgtaccggcgaaggcatcgacgtgttgcgtaaccacctcaagcaaagcatggggtttgataccaatatggaaggcggcttcctggcccgtcgccgtcacctacaggcgctggcggaagccgctgaacaccttgagcagggcaaagcgcagctattaggcgcatgggcgggggaactgctggcggaagagttgcgcctggcgcagcaaagcttaagcgagattaccggcgagtttacctccgacgacctgctgggacggattttctccagcttctgtatcggtaagtaagttttagtccaccctcgtcagtgaacgttcactaacccgcattaactgcctgttaacgcgggtttttactttccatactcgtccatagtcgtgcgggttcatccgcgatttttgtgtcctgaattgtccccatctttaaatccctcgtgtaccattgtttactttttgatctaaaaattacatcaaatgaacacaaaaaacggtataaaaaacgctcaaatatcccttctcatggacacactatagaggtgagatatggcactttcagataccaaattacgcacacttgctcccagaaaccgcccctggcaacttgccgatcatgacgggttggtgattgaagttcttcccaccggacgaaaaatctggcgtttccgctaccgctttgacaacaaatcgcaacagatcacgctgggcgaatacccagctttctcacttgcagaagcgcggctctggcgtgaaaagtgccgctcactggttgcccatggcatcaatcccgcgcagaaaaagcaggaagaaaagcttaaacagaaagacccaacgacagtcaaaacattcgccaaacgctggctgaccgatatcgttgaaaaaagtaaccgcgatccacgcaacatcactcgcgttatcgagaaggacatcattcccatcatcgggaagctggaactcgaagaactcacaactgcccacattcaggtcgtgctcgaccgcatcaagcaacgaggttcggatcacgtcgcattactgacgtgaaacgtgcttaaacgcatgctggcctatgcaatttccaggggaatcatcttcaacaacccggcagcggctatcgaggctcgttatatcacacaagcaacaagtcgtgatgtggcactgaccgcagaagagatcggcatcctgttacgggggatctacacctctaacatgaaccgacgccacaagctggccctgcacctgctgatcatctgcatggtgcgtaaatcggaattgattgaagcaacatggagtgaagttaacttcaacgcgctggaatggcgtatccccggcgaaagaatgaagatggataatccacatattgttccgctgtcaaagcaggcgctggcgatgttcgaagagctaaaatttctggccggagattccccttacgtcttccccagccgacacggctaccgacgtccgatctccaaaacaacgctgaactgtgcggtgcgtacgctggatctgaacgtcagggattttgttattcatgacttccggcgtactgccagcacattgctacatgagcagggctacaactcggattggatagagaaatacctggcgcataagatcggcggcgttcacggtgtctacaaccgtgcggagtacctgaatcagcgccgggagatgcttcagtcttgggctgattttgttgatgcgcagattgagactggaaggaaggttatcattggacaattcgggaagtcttacaatgtaaccgtatgaataatatggaaaatataacaataatagtttctgattagaatatactatctaaccggttgaaaaagatgcacttctcaaccataataacatcactctttagcgttaggctttgatttatagccttgtcgagcgtttcgccagacactaacttattgagtacttttagggttgcgctagaaagttttctaccgatcctagaagtctctaggatcggtagaaaactttctagcgcctcctctagtaaagagtaaaaaacgagcaaaaaacattgctcgtttttttcatcaacggaagacaaatcaaaaatacataacgtttaaatcaatgtttgaagaaactattaaaaaacaatttgaattgttagacataagtaacttcaatgttgatatatctcatcgtctccttttcgtgtgtggtggcaaagtcgatgtacgtgcaccaattccccccagttttagggatagactactcacttacacagcaaaaaatgcctctgaacttcacgaacatttcattctagctgagacattcaaggattattttaaagagaatgcctatccggaccttctggtgtttgaagatgatatagccagtatttcatctcttattatcatttttttagaaagcccaggatcattagttgagttaggtatattttgcaacaaatcagaactatttaaaaaaatactgattgttgcttcagcggaagaagtatacggtgaggactcattcatttatttaggcccactagagtatattaagaagaaagtctcatcctctgttgtaatctatccttggccggatcctgaagtcttaaaatacgataatgattttcttgatgatttatgtgtaaatataaaagaaaaactttcatcaatcccaaaaacagaacaattcagtaaggataattctggacatatagcacttctaattactgaaattatatctctttgcgccccaatacaacttagtgaaatagaatcagccctaaactcattagggattaatatttcaacaaaaattattaacagatcaatttatttacttcagaaagttggttttatagacgttttatcatatagctcaaacaaatattactttccattaaaagagcgcaaatgggtaaaatttggtaaaactaaagataataaactcatagataatcaacaattaaaaatgaaggttagacaatcttttgtaacattaaccgatccattatcaaaacgaagaattacagcgctgcgtcaaataatagcaaaaaaagaaatggctgaggagattaattaatggacatattacagcatatttcagatttactattaaccaagaaaagtgaaatcatttccttttcattgacggcaccttatcgctataaaatatataaaattgcaaaaagaaactcagataagaagagaactattgctcatccttcgaaagaactaaaatttatacaacgtgaaattactgagtatttaaccgataaattacccgttcatgaatgcgcatttgcatataaaaagggcagtagcattaagaccaacgctcaagttcatcttcatacaaaatacttgttgaagatggattttgagaattttttccctagcataacaccacgtctatttttctcaaagttacgacttgcaaatattgatttaactgcagatgataaagtactacttgagaatatattattcttcaaatccaagagaaatagtaatttaagattaagtattggagcaccaagctcacctttaatatcaaattttgtgatgtacttttgggatattgaggttcaagagatatgctctaaaataggcgttaactatactcgttatgctgatgatttaaccttttcaacaaataataaagatgttttgtttgatatacctgacatgcttgaaaacgtactgcctaaatattctttaggtaggattagaatcaatcatgaaaaaacagtgttttcttcaaaaggacataaccgtcacgttactggtataactctaacaaacgataacaaattatccataggtagagaaaggaaaagaaaaatctctgccatgatccatcattttataaatgggaaattatctactgacgaatgcaataaattagtcgggctacttgcatttgctaaaaatattgagccttcgttttataaaagcatggtcattaaatatggatctgataatatttataaattacaaaaacaaaaagacaaataatttctgctgcacttttatagacaccagtgttttgttgattatgcccagaacaacttggaataagttttcctaagcgtattacattatacgcttggcctaacttaatcatagattttccagaaaaataaatttttcaaatcccataaacaattccccacagcttccctacgcccccggtcaaccagggaacgaagcgtggcctgaaactgacctcctgtctcgatacaggtgaccacaccctttatcgctaccctgttgcaagcgtagcggcagacagaacgctgtagataagtcggacggcattgccgaaggctttccgtccgtacttcctgctgaatgtgcaaaacgcggcgtcacttttaagagcgtaagagagtgaaagtgacgccagcgcgcagatcagcttcaacccggctactgcctgcaaatccactgcaacaaactggctgacactcaaacagatgtcagaaattcacttaccagggtcaatctggccgggatctcaaaaaatgcatggaactaaaacgggtctatttacagtttcaccagctacttggtttttgtgtcctttaatgtgcccatagccatgttttcaaggcaaattatagattatatatcaacgaattatctagattttccagtttctgtattggtgtcgggtgacggctgacgccatccggcttacgtcactgccggggtgatatctcattgcctcataggaaatcactgttgtccaaatggcaactcgtctcgcgcaacatcgccccgtattcttagcgccacacttttcgtgaggccgctatgaaacgttttctactgtgtagttttgccctggttttactctatcctgccggtattgatatgtatctggtcggtttaccgcgtatagccgccgatctgaacgccagcgaggcgcagttgcatatcgccttctccgtttacctggccggaatggcgacggccatgctgtttgccgggaagatagccgaccagtcaggccgcaagccggtcgcgatcgtcggcgcgctcgtctttatgatggcctcactgctttgttcacgggcgtcggaaggctcgctatttctgagtgggcgttttcttcagggagtaggcgcaggcggctgctatgtggtggcgttcgccattctgcgcgacacgctcgacgagcatcgccgggcgaaagtgctgtcattattgaatgggattacctgtattgtgccggtactcgccccggtggtggggcatttgattatgcttcgtttcccctggcaaagtctgttctatacgatgtccgcgatgggcattattgtgggcctgttatcactgtttatcctgcgcgagacgcgcccggtaaggctggctccacgcgatttatcacgatcgtcgcccgccgccgagtcgctgattaaccgttttttcgttagtcgactggcgatcaccacccttagcgtgtcggtgatcctgacctttgtcaatgcctctccagtgctgctgatggaggtgatgggatttagccgtggcgactatgccattaccatggcgctcaccgcaggcgtcagtatggtcgtctctttttccaccccttttgcgcttgggttatttaagccgcgaaccttaatgctcgtctcacaggggctgtttttgacggctggcgtgacgttaagccttgctcataccaataccgtcacactctttggcctgacgcttatctgcgccggattctcggttggttttggcgtcgcgatgagccaggcgctggggccgttttcgctgcgcgccggagtggccagttccacgctcggtatcgcgcaggtttgcggttcatcactgtggatttggctggcggcaatactcggtatcagcgcgatgaatatgctgatcgggattctgattggttgtagcatagtgagtattctgctgatcttctccgtcacgcccaacaggtccgtagccgagcatgaagaaatcccttaccaatctcgaccttaatttgctgttatgcctacagttactcatgcaggagcgcagcgtcactaaagctgcaaaacggatgaacgtaacgccctcagcggtcagcaaatcgctggcgaaactccgggcatggtttgacgatccgctgttcgtcaatacgccgctgggcctggcgccgacgccgctgatggtcagtatggagcaaagtctggcggactggatgcagatggggaatcaactgcttgataaaccgcatcatcaaacgccgcgcggtttaaaatttgagttggcagcagagtcgccgctgatgatgattatgtttaattcactgtcgcagcagatttatcagcgctatccgcaggctaccattaaggttcgcaactgggattatgactcgctggaggcgattacgcgtggggaagtcgatatcggatttaccggacgcgaaagccatccccgctcgcgagaattgctcagtctgttaccgctcgcgattgattttgaggtactgtttagcgatttaccgtgggtctggctgcgggaagatcatccggcgctgcgcgaagcgtgggatctggacacttttctgcgctacccacatatcagtatttgctgggagcaaagcgatacctgggcgctggacgatgtcctgcaagaaatgggacgcaaacgccatatcgcgttgagcctgccggggttcgagcagtcgctctttatggccgcccagccgggtcacaccctgatagcaaccgcgccgcgctattgccagcactacaatcagctccaccagctaccgttagtggcgcgccccctgccttttgatgcgcaacagcgggaaaagctgatggtgccgtttaccctattatggcacaaacgtaatagtcataatcccaagattgtgtggctacgacaggctatcaacacgctctgccgtcgccttatctgaccacctgcgttgataaattaaccttcctcttaccagaaatgtcaccatctgattaaagaaccttctgaaattgaatttttagcgcgtaaaacctgtccataatttacgttaatgttactctcgtcattatcacggcccattaatcacggagcgaaaaatggcgactcactttgccagagggatacttacggagggacagttggtttcaattcgtctctcttcgtcttgccatattgaagccagaaacctgcctgctcaccgacgaacgcgttttctcgcctccagaggccttcttgccgaactgatgtttatgctgtacggaattagcgagctgccggaaatcattattcaggcgaaaggtaaacccgcgtttcgtgacaaaaatctgccaggcttttctatctcctatgccggaaatatggttggcgtggcgttgaccaccgaaggagagtgcgggctggatatggaattacagcgcacctcccgcggctttcaccatccgcattcgctcgaacgccaccctttctcccgtaatgaaaacttatgggtagccaatcaaaacgatcccaacgaagcgcgagcgcaactcatcacattgcgccagagcgtgttaaaactcaccggcgatgtcatgaatgacgatccgcgggagctgcaacttttacccgttgccggacgcctgaagtgcgcgcatgtcacgcagcttgaagccgtgtgcgatgcggaagatgtgctggtatggtccgtaaccgttacgccagcgatagaaaaattaaaagtgtgggagttcgatggcaaactgggctggaaaagcctgcccgatatccagacgcgcgccaatgagccaaccggtcgtctgatgcgattcgcccaactccccgccgccaaatcgtatacgcttaatcgttcataatgaaaaaaggggcacgtatgtctgaaacgctgaatgtggttacactgctgggaagtttacgcaaaggttcctttaacgggatggtggcgcgtacgctgcctaaagtcgcgccggcaggaatgacggtatcgccgctgccttcgatcggggatattccgctgtatgacgccgatatccagcaggaagagggatttccagccagcgtagaggcgctggcggagcagattcgcaacgccgacggcgtcgtcattgtgacgccggaatataactattccgttcccggcggcctgaagaatgccatcgactggctatcccgtctgcctgagcagccgctggcgggtaagcccgttcttatccagaccagttcaatgggggcgattggcggcgcgcgctgccagtatcatctgcgccagattctggtgttccttgatgcgatggtgatgaacaaaccggagtttatgggcggcgtgattcagaataaagtcgacccgcagactggagaagtggtggatcagggaacgttagatcatttgaccggtcagttgaccgcatttggcgagtttattcagcgcgttaaagcgtaagttcgttaaaaaccctccccccgatggggcgagggttcatttcatcagtgtgcgtcaataaacacaatcttcagcacaaataacagcgcgacaatcactacgcacgggctaaggtcgcgcaggcgaccggtaccgattttcatcacgcagtaagagataaagcccagcgcgataccttcggtgatcgagaagctaaacggcatcattaccgccgtaataaacgccgggaccgattcggttaaatcctgccagtttacccgcgccaggctggaggtcatcagcacgccgacgtaaatcagcgcgcccgccgccgcgtaaggcggcaccatgcccgccagcggcgacaggaagataaccagcaggaacaaaataccgaccaccaccgccgtcaaaccggtgcgaccgcccaccgaaacgccggaagaggactcaatataagcggtcacagaagacgttccgacaaatgcgccagtgacagaagagatactatcaacaaacagcgcctgcttcatgcgcgggaatttgcctttctcatccgccaggccggctttatcggtcacgccaatcagcgtaccggaggagtcaaacaggtttaccagcatgaaggagaaaataacccccgccaggccaagattgaacgagcctgccaaatcgacatgccctaccacgctggtgacgcttggtggcgcggagacaataccgttgtagtgtacatcacccatcatccagccaagcagcgtcgtgacgatgatggacaccagcaccgccgcatgaatgttgcgcgaagcgagaatcgcaataataaagaatccgagaacccccagcagcacgctgtgcgaggtcaggttgccgatgctgaccagcgtttccgggttagcgacgatcacgccggcgtttttcagccccatcatgccgataaacaggccgatgccgctggtgatgcccacgcgcaggctgaccggaatgttggcgatcatccagtaacgcacgcggaagatagtcagcaataaaagaccaacagcgccccagaaaatggcgcccatgcctacctgccacggcagtcccattgcctgcacaaccacgaaggcaaagaacgcattcagccccatcgcgggcgccagcgccaccggcaagttagcgaacaggcccatcagaatactgccaaaggccgcaatcagacaggtggtcacaaagacggcgctggtgtccatgccagctacgcccagaatttgcgggttaacaaaaacgatataaaccatcgtcaggaaagtggtaaaaccggcgatcacttcggttcgtgccgtcgtgccatgttcgcgcagtttaaacacgcgttccagcataccctgaccagaagcctgggtggtgtgttgttgactcattatcaatttccggagaaaggagggaaaattcgccgttatcctataccaaaatgcgacacctggcgcagttgtgtggtaatttttttcactcaatttgttagtacggcaacgattgcgtcccctcattcagcattacgtaaacgttaaacttgttaaaatggaaatgacatgtcccaaatcgaagcagtgttttttgactgtgacggcacgctggtcgacagtgaagtgatttgctcgcgcgcctatgtcactatgttccggcagttcggcattacgcttgagctcacggaagtattcagacgctttaaaggcgtaaagctctacgaaattatcgataccatcagtaaagagcatggcgttgcgctggcaaaggcggagctggaacccgtgtaccgcgcggaagtggcgcgcctgttcgataccgaactggaagcgatcgcgggcgcaaataccctgctggagagcattaagacgcccatgtgcgtggtatccaacgggccggtcagtaagatgcagcattcgctgggtaaactgggcatgttgcatcattttcccgatttgctgtttagcggttacgatattcaacgctggaagcccgatccggcgctgatgctccatgcggcgaacgccatgaaggtcaatgttgagaagtgtattctggtggatgattccagcgcaggcgcgcagtcaggaattgcggcgggaatggaagtattttatttctgcgccgatccgcataacaaaccgatcgatcaccctaacgtgacgacgtttaccgatttggcgcagttgccgggattgtggaaagcgcgcgggtgggagattacgcgttaactgaaatgcccggtggcgctaacgcttatccggcctacagcatctgtacctgtaggcccggtaagcgcagcgccaccgggcaaaagaatgagatttactctttcggatctttccccgccagcagcttatccagctcatcgccgccgacgtgacggaaatcctgccccttcacgaagtagaagatgtattcgcagatattctggcaacggtcaccgatacgctcgatagagcgcgcgcagaataacgcggtcagcacgctgggaatggtgcgcgagtcttccatcatgtaggtcatcagctgacgcacgataccttcgtactcctggtcaactttcttgtcttcacggtagatacgcaccgcttcgtcgagatccatgcgcgcgaacgcatccagcacgtcgtgtagcatctgcacggtgtggcggcccagtgactccagactcaccagcagcggctgatgctgctgggagaatttctccagcgcggtacggcagattttatccgccacgtcgccaatgcgctccagttcggcgatggttttgataatcgccatcaccagacgcagatcgctcgccgtcggctggcgcttggcgataatacgcacgcaggcttcatcgatggcgacttccatcatattaacctgatgatcgccttctaccacgcgcttcgccagctcgctgtcctggttgtgcatggcggtgatagcgtcagaaagctgctgctccaccatgccgcccatggtcattacctgagtgcggatgctttccagttcggcgttgaactggccggaaatatgtttattaaggttcagactgtccattacgcactcctgaattaaccgtaacgaccggtgatatagtcttctgtttgtttcttcgcgggcttggtgaacagatcgtccgtgttgctgaactcaatcaactcgcccaggtacataaacgccgtatgatcggagcaacgtgccgcctgctgcatgttgtgggtcacgatcaccacggtgtaatcctgtttcagctcggtgatcagctcttcaatacgcccggtagagatcgggtccagagctgaacatggctcatccagcagcagcacttccgggcgaatggcgataccgcgcgcaatgcacagacgctgctgctgaccaccggagagagagtacccgctctggtgcaatttatctttggtttcgttccataatgcggctttggtcaacgcccactgcacgcgctcgtccatatcggcgcgagacagcttctcaaacagacgcacgccaaaggcgatattgtcatagatggacatcgggaacggcgtcggcttctggaataccatccccacttttgcgcgcagcagcgcgatatcctgggtgttggtgagaatattgtcgccatccagcagaatttcaccttccgcgcgctgctccggataaagcgaatacattttattgaaggtacgcagtagcgttgatttaccgcagccggatggcccgataaatgccgttacctgattcttcgcgatatccagattaatgttcttcagggcatggaatttgccgtagtagaagttcaaatcacgaacctgaatcttactcggggcagtttcaaccatactcatttcactcttttcctcatccagcgccgcatccgccacgccgtaaaataatgcctgatggcgctacgcttatcaggcctacaatgtctttaaccgtgttttttcttcgcgaaaacaacacgcgccagaatattcagcagcagtacgcacagggtaataatcagcacgcccgcccaggctaattgttgccattcggcaaacgggctcatcgcgaatttaaaaatggtcaccggcaggttggcgatcggctgcatcatgtcggtgctccagaactggttggagagcgcggtaaacaacaatggcgccgtttcgccggcaatacgcgcaatagccagcaggataccggtcataatgccggagatagaggctttcagcgtaatcgcggaaatcatcttccacttcggcgtacccagcgcataagcggcttcacgcaggctatccggcaccaatttgagcatgttttcagtggtacggataacgatcggtacctgcaacagcgccagcgcaatcacccctgcccagccggagaagtgctgcatctgcgccaccacgatggtgtaaacaaacagccccacaacaattgacggcgcggaaagcagaatgtcgttaataaagcgaatgatttccgccagccaggatttacggccatattccgccagatagatcccggccataatccccagcggcgtacccaatacggtagcccagagaatcaataatccactccccgccagggcgttcgccagcccgccgcccgccgtgttcggcggcggcgtcatttcggtaaacagcgccagcgacatcccgtcgataccacgcgtgatggtggacatcaaaatccagatcagccagaacaggccaaatgccatcgtcgccattgagagcgttagtgcgatacggttcttcatgcggcgacgcgcctgcatcttgcgacgggattccgcgagctgcgcggtgttctgcatatcaagcgtagccattaacgtgctccctcgttcttcgccagacgcataatcatgaacttagacgccgccaggacgataaaggtgatcacaaacaggatcagccccagctccatcaacgctgccacgtgcaggcccgattccgcctcagcgaattcgttcgccagcgcggaagtgatgctgttgcccggcatatacagcgacgcgctgtcgagctggtaagtgttgccgatgataaaagtgaccgccatcgtttcacccagagcacggcccagccccagcataatgccgccgatcacgccatttttggtgaacggtagcacgatgcgccagataacttcccaggtagtacagccgataccgtaagcggactctttcatcattaccggtgtttgctcgaagacgtcgcgcataaccgccgcaatgtaggggatgatcatgatggcgaggatgacgcccgccgccagaatgccgataccaaaggccgggccggagaacagcgcgccgacaaacggaatgttggaaagaatattgccgaccggctcctggaagtacgtcgcaaacagcggcgcgaagataaacagcccccacatgccgtacacgatactgggaattgccgccagcagttcaatggcgatgccgagcggacgctttagccagcctggcgccagctcggttaaaaacagggcaatgccgaaactgaccggaacggcgatcagcagtgcgataaaggaggtcaccagcgtgccataaatgggcaccagagcgccgtagatatcgtttggcgcgtcccattccttagtccaaagaaatgagaaaccaaatttctgaatacttggccaggaggagatgatcaatgagacgataataccgcccaacatcaatagcacaatcagcgcagccagttttaccagcgcgctgaaaatcatgtcgccttttttacccggcgggttaaaagcaggcttggttgcagccataaattactctttccattaaacgcattttacgacgttgcccctgccggatggcgctacgcttatccggcctacaacgtgggcctgcggtcgaaaccgtagggcggataagcgtagcgccatccgccaattcgttaattaatacagcgccttaccgttgctgtcttttatactggtcttccatgcagcacgaacctgctcaacaacgttatccggcaggctggcgtagtccagatcattcgcctgcttagcgccatttttgtaggcccagtcgaagaacttcaacacttcagcaccctgctcaggtttcttctgcgctttgtggaccaggataaacgtggtggaagtgattggccacacatcgtcacctttctggttggtcagatcctgcgcgaaggttttgctccagtctgcgcctttcgccgcattagagaagctctcttccgtcgggcttaccggtttgccgtcggcagaaaccaatttggtgtaggccaggttgttctgcttggcgtaagcgtattcaacgtagccgatagcgcctggcagacgctgtacaaatgccgcgatgccgtcgttacctttaccgcccagaccggttggccagttcacggtagaacccgcgcccactttcgatttccactcgtcgttgactttcgccaggtaactggtgaacacgaaggaggtaccggaaccgtcagcgcgacgcaccacagcgatgttctgagaaggcagcttcacgcctgggttcagtttggtgatggcttcatcatcccacttcttgattttaccgaggtagatgtcacccagcgttttaccatccagcaccagttcgccggatttgaggcctggaatattcaccgccagcaccacgccgccgatcaccgtcgggaactggaacaggccttcctgattcagtttttcgtcagacagcggcgcatcggaagcgccaaaatcaacggtattcgcggtgatttgtttcacgccgccggaagagcctatcccctggtaattgactttgttaccggtttctttctggtaggtatccgcccatttggcatacaccggcgcaggaaacgttgcaccggcacctgtcaggcttgctgctgcaaaggcagagaacgcgctcatcgataaggtcgcggcgacaacagttgcgacagtggtacgcataactttcataatgtctcctgcacggtttcggtaaatcgttgtttgagttgctacgatgagcaaaataggacaaattgatgacagttatatgtcttgattatgacggtttgatgacaatggaaataaaaaaagctggcccggggagacaccagaccagcctgcagggggagatgaattagactgtttgcgcaaccgcagacggtttcaacagcgcgtacatcaggccgcagacaatcgtgcccagggcaatcgagagcagatattgcatcacatgttctaccgcatgcgggatcgccaggacaaagaggccaccgtgtggcgccatcagtgtacaaccgaaatacatggacagtcccccggcgattgcgccaccgaccatcgtggaagggatgacgcgcatcgggtcacgcgcggcgaagggaatcgccccttcagagataaagcacagccccagaataaaagatgcattacccgcttcatgctcagcggcattgaatttcgctctggccgcccaggttgcgacgcccattcctaatgccggtaccatccctgccgccataatggccgccatcggcatataggaatgagaagccagtaaaccgacgccgaaggtatacgcagctttattcaccggcccaccaaggtcaaaaccttgcattgcgcccagcaacattcccagcaagatagcattcgtagaggtcatattccccaggaacgtcgtcagcccttccatcaccgcagacaccgggccacccaccacgtaaatcatgattaggccggtaatcagcgtagacagtagcggcagaaccagcacaggcttaagcgcttccattgacgctggtagcttaatattttgcgccagaaaccgtacgctgtaaccggccagaaaaccggccacaatccctcccaggaaaccggcgccgcacaggctggccaacatcccgccaataagccccggggccagacccggacgatcggcaattgagaaggcaataaacccagccagtaccggcaccatcagcgcaaaggccgccttaccaccgatttgaaataacgcagccgccagcgtgcccggctcgttgaaggcctggataccgaagacaaaagagagtgcgatacacaatcctcccgccaccaccaaaggaagcatatgggatacgccggtcattaaatgcttataaacgccgggtagctctgttttaccagctgaagaagagcgcccggcactcccctgatagacctcggcgctattgaaagcattatccatttcctgcgcactcttttttagcgccgcgccggtactggtgcgatagagtcttttgccaacaaagcctgacagatccagctcaatatccgccgcgataatcaccacatccgcctgcgctatctcttccgcggtcagcgtgttcttcgccccgacggaaccgcgggtttcaaccttgatccagtcaccacgcttgcgggcttcaatttccaacgcttctgccgccataaaggtatgggcgacgcccgtcggacaggccgtcacagcaacaatttttttagtcatagtagggtaccctgttcttttaatttaaagaaaaagcgggaaaaaatgttacaggcgtgaccaggccgctgctttctggaacagcgcgtcatccgggcgaatcccggtataaaggacaaattgctccacggcctgaatagcaaacacttcggaaccggtaatcacggttttaccgcgttcacgggcgtagcggattagcggcgtgacgggcggtagcgccaccacatcaaagataacgctcgccttatccacttcctgttcggaataagaaagtttgtcggcatcattaccgccagccattccgataggcgtggcgttaattaacaaatcagcttcaataccgtcggtatccgggcgccattcatagccatagagttcggccagttgtttacctgacgcttcatcaatcgcgacaatataaccacgggtaaaccccgcatccttcagcgcgcaggccaccgcctttgccataccaccgctgccacgcaaagcaaacaccaggtcgggagagaccttgtaattcgccagcaagcgagctattgcaatgtaatcggtgttgtacgccttcagatggccattggtattcacaatggtattaactgagtgaatggcctgagcggaagcatccagttcatccaccagcggaatgcaggcttctttaaacggcatagagatcgcgcatccacggatccccaacccgcgcacgccgctaatggcctgcgtaagatcggtcggcgaaaaagctttgtagagataattgagatccagcgcttcgtacagatagttgtgaaagcgtgtaccgaagttacttgggcgtgccgccagggacatgcagacctgagtgtctttattaatgcgctttgtcatgatgaatcctcatagaagttgcgatagagaaaatcatcggctaaaaaggggatattaaaaattgctcattcccgttcgggaaatttcaccttttatgacaacccggcacactgaacaaaaatacttaaagctactccagcactatggcgacaagcctgttagcgtgacattacaggagctggcggatgtgttgttctgcacccgacggcatatgcgtaatctgttgcttcagatgcaggaggcaaagtggctcatctggcaatcacaggccggacgtgggcatcgcgcccggcttcacctgcgctataaaccagaacagctgttaagcgaaaaggcggagcagttactggagtctggtcatattgatcaggccattcagctgctgggtaaaaataagcaccaggtggcgcaactgctgcgttcaaagctgggctatagcgtgcgggcagactatcagcggctgtgcatcccctattatcggacaatgccgtcgctgtgccccggcataccgttgcgtcgctctgagcagcatctggtcaggcagatttttagcggcctgacgcgcataaatgaggaaaaaggtgaagtcgaagccgatcttgcccaccactggcggcagattgatccactgcgctggcgtttttatctgcgccccgccgtcctctggcatgatggtcaggagctgacgatcgacgcggttatcgcttcactgacccgcagcgctaagctgccgttgttctcgcacttgcagaccattcaggccaccgggccgctgagccttgaaattacgctggcgcacccggataaccgactgccgctgctgctcagccatattgatgccatgatcctaccgcctgaccatacacaacgcgctgatttcccggcacatcctgtggggactggcccttatgaggtggtggaaaacaatggctttcatctacaaatgaaggcctttgaccactatttcggtctgcgcgggctgctggatgaagtggaggtctttatctggccgaatttaacggagacagacaacctggcggaatcgctgtcggataacgacacggcagcctggctcagctccagcctgagcgatgaggattacgtttccggacggcttagccaggtatcaggcaaaccttctgacaacctgcgcgagatgtttcttgagcgtggaggatattttttattatgcgacagccgctccccgcactggcataccgccgaacatcgccgctggctacgggaaacactcagcccttacgccatactccagcatctgagtgaggcaattcgccccttctgggtaccgggcggcagcctgctgtcctcctggtttcatactattgaggcgggcccggcctgttcaccttttatctcgtcgtcgccctacgcaaaactgcgtctggcctatcacgatcagcaccctgaatttccaatgctcctggatatcatgcaagagatcatgcgccagcagggcattttacttgagggcgttgagctgaattatgatgactgggcgaatggcaaagccaatgtggatctctggctggggacggtcaatttccccattcccgaagagtggaacgtcggtacatggctactgggctcccctttactgcgccacgccatcagtggtggggatgatgcgctgctggcccaatgggaaacccagtggcatgccgaaaccatcagcgcggaacaactggtcagggaaaccacccgttcaggctggctacagccgctttttcaccactggatgcgactcaaaagccccgaccgggccagggggatccacctgaataacctggggtggtttgatttccgatccacctggattgagccagggccttaaagaagagaatgtgaccgggtgcccgtagcgcaggcaggcgtagcacctcttagtcgctcttcagccaccatagagaaagaacagcgcctgtcacagcgcacaaaaaaaggccgtctgtcgacggccttctgcctggtactacatttgtacttactctacggtaaccgatttcgccaggttacgcggctggtcaacgtcggtgcctttaatcagcgccacgtgatacgccagcagttgcagcggaacggtgtagaagataggcgcaatgacctcttccacatgcggcatctcgatgatgtgcatgttgtcgttgctgacgaaacccgcatcctgatcggcgaagacgtacaactgaccgccacgtgcgcgaacttcttcgatgttggatttcagtttctccagcagttcgttgttcggcgccaccacaatcaccggcatatcggcgtcaatcagcgccaacggcccgtgtttcagctcgcctgcagcataggcttccgcgtgaatgtaagagatctctttcagcttcagcgcgccttcgagcgcaatcggatattgatcgccacgccccaggaatagcgcgtgatgcttgtcggagaaatcttctgcaagcagctcgatgcgtttgtcctgcgacagcatctgctcaatacggctcggcagcgcctgtaggccatgaacgatatcatgctcaatggacgcatccagacctttcaggcgagacagtttcgccaccagcatcaacagcacggttaactgggtggtgaaggctttggtagatgctacgccaatttccgtacccgcgttggtcatcagcgccagatcggattcacgcaccagcgaagagcccggcacgttacaaattgccagagagcccaaatatcccagctctttcgacagacgcaggccagccagggtatctgcggtttcgccagactgtgacagggtgatcatcaggctgttacggcgcacggcagatttgcgataacggaattcagaggcgatttcaacgtcgcacggaatacctgccagcgattcaaaccagtaacgggaaaccataccggagttgtaagacgtaccgcaggcgaggatctgaatatgctcaaccttcgacagcagttcgtcggcgttcggtcccagctcgcttaaatccacctgaccgtggctgatgcgcccggtaagggtgtttttgatcgcgttcggctgttcgtagatctctttctgcatgtagtggcggtaaatacctttatcgcccgcgtcatattgcagattggattcgatatcctgacgttttacttccgcgccggtgttatcgaagatatttaccgaacggcgagtgatttcagcgatatcgccctcttcaaggaagataaagcgacgagtcactggcaacagcgccagctggtcagaagcgataaagttttcgcccatacccaggccaatcaccagcgggctaccagaacgtgccgccagtagggtatccgggtgacgggtatccataattaccgtaccatatgcgccacgcagttgcgggatagcacgcagaacagcctcacgcagagtaccgccctgtttcagttcccagtttaccaggtgtgcaatcacttcggtgtcggtttcagaaacgaaggtatagccacgcgcttttaacgcttcacgcagcggttcatggttttcgatgatgccgttatgcaccaccacaatgtgttcagaaacatgcggatgcgcgttagcttctgaaggttcaccgtgcgtcgcccagcgagtgtgagcaataccagtgccgccatgcagaggatgttcttccgctgcctgagccagcatctggactttaccgaggcgacgcaggcgggtcatatgaccttctgcatccaccacggccagaccggcagagtcatatccgcggtattccagacgacgtaaaccttcgagaaggatttcagctacatcacgctgcgcgatagcgccaacaattccacacatagttttatttcctgattatggcattacgccatgcgttgtcgctgacctgtatgcccgtcgttgcgggcgccccgagccttgtagagagtggggttatttttataagtactgctcatggagcggaggattattttatcctctcatctccggtctgccggatggcgctgacgcttatccgacctacaaaatcactttttcttcaccggacgctgccagccttgcttatgcacctgcggcacgcggcttaataccagttcattgtcggctacattacgggtgacggtagtccctgcggcgatggtggcccctttaccaacagtaaccggcgccaccagttgggtatcggagccgacaaacacatcgtcgccaataaccgttttgaatttgttcgcgccatcatagttacaggtgatggtccccgcgccgatattcacgttgtcgccaatttccgcatcgcccaggtaggtcagatggccggctttagaacctttaccgagacgcgcttttttcatttcaacgaaattgccgacgtgagcgcccgctaacagctccgcgccgggacgcaggcgagcaaacggaccgatggtgcaggccgcttccagatgcgcatcttccaccacgctgtatgggctaatttcgcagtcatcgccaataacgctgtttttaataatgcagcccgcgccgatcttcacgcggtgaccgagcgttacataaccttcgatgataacgttagcgtcaatttccacatccattccacaatgaagggtgccgcgaagatcaaaacgtgccggatcgcgcaacataacaccggataacagcagtttctccgcctgttcggcctggtaaatacgctccagacgagaaagctgtagacggttattcacgccgtccgtttcgctgatgcgagccggatgcaccgcggcgatttctcgtccttcctgataagccagcgcaatgatatcagtgatgtaatattcaccctgcgcattattgttagtcagcttagacaaccaacgtttcatgtccgcgccgttggcgatcagaataccggtgttaatttcctgaatctgacgctgttcatcagtggcgtctttatgttcaacgatgccggtcactttaccgttttcacgcgtaatacggccatagccgctcggatcgtccagcttcacggttaataacccaataccaccctgcggtttggcatcgcgcaggcgctgtaaggtttcaaccgaaatcagcggcacgtcgccgtaaagcattaaaatatcttcatcgtcgctaaagaagggcgcggcctgctgcattgcgtgacctgttcccaactgttccgcctgaagcacccagttcagcttgtcatctttcagggtctgttttaacaactcgccaccgtggccatagaccagatgaacctgtgcggcccctaatttagtagctgcatcaatgacatgctgcaccatgggtttacccgccagcgtgtgcagcactttaggaatatcggaatacatgcgtgtgcctttacctgcggcaaggatcactacgctcatagcactatttaacatacgcgtcctgactgtaatttgagaacgaatttatactgtttcacgttgaaaatactacatttttttcatcgtaaaatggaagaaggataaaacgctcaccgggataaaatccccgcctgctaatgaatcattttcgttcattaccgcgcctcttgtctcctgaaaagtaaaaacacccgcgtattggcaacgtagtccgatgtttttgctgtttttttactccataaataaagaagataacgtaataaagcgcaggggagtcagaaaagcaaaaaccagcgacagaggccgctggttttccgttgcgcgtattttttacttaattacgcgacataaaaatccgcaaaatataccagaacatggtcgcgatagaagcaaacagatgtaatgccgcgccagcagggcgatcggtagggtaatggtgaataatgttagaagtatcgtaaagtataaacccggcgcacagcagtaccattagcgcagaaaaccagacgcccagcgagaagccgcagatgacgctggcaataatcgcgccaaaagcaatgaacccagccatagtcagaaacgagcgcagaaaagaaaagtctttttttatagaaaaagcggtaaacgtcaggccgccgaccagcaacagagtcgttattgccgccgcgccaatgctcgacgggttaatatacgccgccaccgttaacaggggggcaaaaatcagggattctgccaacacataaatccccagcccgataagttgcgtttgattattccccgcattatccgccagacgggtcgccagcattcccaccagcataaaagcgccgagaacaaccaaccagctatatcttccaccagccagcagcacatcaagcgcatactccccgacccctataaaactccacgccgcgctcaatacgataaaaccgacgatggcgacggcgagatgaagataagcacgacgaataaaggtagtacgatcaatccttgagtcgggttgtggacccgcaaaggatggctgaaatgacatagtaataatccctcattttatgcaataaaaacgcatccattcctcccttcttcgcacaatgtgcagatgccaatgacagaaagaaggatttaatgaaaacagcgctgtcgctgaaaacgcgtcgccttcagccgcttgtttttgtcgttgctagtttatcgaataaaaattgagaggataaaaaaaaaccagtccgcaatcagactggttttatgctttcaagccggtgttacatcgcttttttggtcaactcgataacgcgcagtttagcgatcgctttggccagttccgcagacgcctgagcgtaatccacgtcaccgtgcgagctcttaatgtgctcttcggctttacgcttcgcttccagggctcgcgcttcgtcgagatcctgaccgcgaatcgcggtatccgccagaacggtcacgctgccaggctgcacttccagaatgccgccggacagatagataaactcttcatgaccgtgctgcttaacgatgcgaatcataccaggcttaatggcggtgagtagcggcgcgtgccccgggtaaatccccagttcgccttcgctacccgtaacctggattttctcgaccagaccggagaacatttgttgctccgcgctgacgacatccaggtggtaagtcattgccatatcaccctccgattaaggcgttaaagttttttggctttttccacggcttcgtcgatggaaccgaccatgtagaacgcctgctccggcaggtgatcgtattcgccttccatgatgcctttaaagccacggatggtgtctttcagggagacgtatttgcccggagaaccggtaaatacttccgccacgaagaacggctgggacaggaagcgctgaattttacgcgcgcgagctaccaccagtttatcttcttcagacagttcatccataccgaggatggcgatgatgtctttcagttcctgataacgctgcaggatggactgaacgccacgcgcggtgtcgtagtgttcctgaccaacaaccagcggatccagctgacggctggtggagtccagcgggtcaacggccgggtagatacccagggatgcgatctgacggctcagtaccacggttgcatctaagtgcgcaaaggtggtggctggagacgggtcagtcaagtcatccgccggtacgtataccgcctgtacggaggtgatagaaccggttttggtggaggtgatacgttcctgcagaacgcccatctcttccgccagagtcggctggtaacctactgcggaaggcatacggcccagcagtgcggatacttccgtaccggccagggtgtaacgatagatgttatcgacgaacagcagtacgtcacgaccttcgtcacggaatttctccgccatggtcagaccggtcaatgcaacgcgcagacggtttcccggcggctcgttcatctggccatacaccagggatactttatcgataacgttggagtcggtcatttcgtggtagaagtcgttaccctcacgagtacgttcccctacgcccgcaaacactgagtaaccggagtgctcgatcgcgatgttacggataagctccatcatgtttacggttttacctacacccgcaccaccgaacagaccgactttaccgcccttcgcgaacggacacatcaggtcgataactttgataccggtttccagcagttcctgagagtttgacaactcttcgtaggaaggcgctgcgcggtgaatcgcccaacgctcttcttcgccgatctcgcctttcatgtcgaccggttcgcccaggacgttcatgatacgacccagcgtagctttacctaccgggacttcgatcgggtgttcgagatcttttacatccagaccgcgacgcagaccgtcagaagaccccatcgcgatggtacgcacaataccgccgccaagctgctgctgaacttccagcaccagcttctcattaccattctgcacctcaagggcatcgtacacgcgtggtacggcatcctgagggaactcgacgtcgaccacggcgccgattacctggacaatctttccagtagccatcttaaatcctctacgaaataacctggttaaaccgcggcggcccccgagacgatctcggtgagttcctgagtaatgctggcctgacgagctttgttgtataccaactgcagctctttaatcaggctgccgccattatcggttgcggctttcatcgccaccattcgtgcggcctgctcgctggccaggttttctaccacgccctgataaacctgagactccacataacgacgcaggagagtatccagcagcgctttcgggtctggttcatacaggtaatcccaggctttacgcttcagatcatcatcttctgacgccggcagcggcagcagttgagtgatcgtcggcacctgagacatggtgttaataaatttgttgctgacaatgtaaagcttgtccagacggccttcgtcgtaggcctgcaacatcactttaaccggaccgatcagttcggacagagaagggttatcccccatacctgtcacctgagcgacaacgttgccgcctacggaattaaagaatgacacgcccttagagccgatcattgcgagttcgcactgaacgcctttatcggaccatgccttcatatccgccagcagctttttgaacaggttaatgttcaagccaccgcacaaaccacggtcggtcgacactaccaggtagcccacgcgtttaacgtcgcgctcttccaggtaggggtgcttatattccagattaccgttcgcaaggtgaccaatcactttgcgcatggtctctgcataaggacggctggccgccatgcgatcctgcgatttacgcattttggaagcggcgaccatctccatcgctttagtgatcttttgcgtgttctggacgcttgcgatcttactacgtatctcttttgcgccggccatgagcttctcctcaatgccttacggcctgccctaaggcaagccgccagacgttaccaggactgggttgctttgaaggaatcgaggatgcctttcagcttgccttcgatttcgtcgttatagccaccggactggttgatctcttgcatcagcggagcgtgatcacggtcgacgtaagccagcagtgcggcttcgaagctaccgattttcgccagttcgacatccgccagataaccacgttctgctgcgaacagaaccagagactgctgcgcgacggacatcggcgcatactgtttctgtttcagcagttcggtcactttctgaccgtggtcaagctgtttacgggtggcatcgtcaaggtcggatgcaaactgagagaacgccgccagttcacgatactgcgccagcgcggtacgaataccaccggacagttttttcatgatcttggtctgggctgcgccacctacacgggataccgagatacccgggttaaccgcaggacggataccggcgttaaacaggttagattccaggaagatctgaccatcggtaatggaaattacgttggtcggaacgaacgcggaaacgtcacctgcctgcgtttcgataatcggcagcgcagtcagtgaaccggttttccctttcacttcacctttagtgaaggcttcgacgtagtcggcgttaacacgcgcagcacgctccagcagacgagagtggaggtagaatacgtcgcccgggaatgcttcacgtcctggcggacgacggagcagcagggagatctgacggtaagcaacagcctgtttagacaggtcatcgtaaatgatcagcgcatcttcgccgcggtcacggaagtattcgcccattgcgcaaccggcatacggcgccagatattgcagcgcagcggattcggacgcggtcgccaccacaacaatggtgttagccagcgcgccgtgctcttccagtttacgcaccacgttagagatggtggacgctttctggccgatagcgacatagatacatttgatgccggagtcgcgctggttgatgatggcgtcgatagccagcgcggttttaccggtctgacggtcaccgatgatcagttcacgctgaccacgaccgattgggatcatggagtcaacggctttatagccggtctgcaccggctgatcgacagactgacgatcgataacgcccggcgcaatcgcttcaacggcagagaagccgtcattatcaaccggacctttaccgtcaattggcgcacccagggtgtttaccacacgtcccagcaggccgcggccaaccggaacttccaggatacgacccgtacatttaaccttcatgccttcggcaaggtcagcgtatggacccatgactaccgcacccacggagtcgcgctccaggttcagtgcgatagcgtaacggttacccggcagggagatcatttcaccctgcatacaatcggccaggccgtgaatgcggataacaccgtcactgacagaaacaatagtaccttcgttgtgagcttcgctcaccacattgaactgagcaatgcgctgcttgatcagttcgctgatttcggtggaattcagttgcatgctccagtccccttaagactgcaagacgtctgcaaggcgctcaagacggccgcgtacgctgccatcaatgaccatatcacccgcccggatgataacgcctgccattacagacttatcgattttgcaattcagcttcactttgcgtgacagacgtttttccatcgcggcgctgattttcgaaagctgctcttcactcaatgcggttgccgacgtaacttctacctcggaggtagcttcactggcggcacgcagatgaataaactgctccagaacatccgggagcgcgttcagacgattattttcagccatcacccgaatcaggttctgaccgttttcgtctaactgctcaccgcagactgcgataaacgactcagcgagcgtttccggcgccagcgcgccagagagaagctctgccatttgttcgttcttggttacctcggcggcaaacgccagcatatcctgccagcgctctacactttggtgttcaacggcaaagtcaaaagctgctttggcgtaggggcgagctaccgtaacaaattcagacatcagcccctccctccttacagttcagcgacaagtttatccacgatgtcgctgttagcagcttcatccacggaacgttcgatgatcttctcggcgccagcaacagccaggatagcaacttgcttacgcagctcttcacgggcgcgtttacgctcggcttcaatttccgcctgcgcctgcgccacgattttagtacgttcctgctctgcttcagttttggcttcgtccaggatctgagcgcggcgtttgtttgcctgctcgatgattacctgagcttccgctttcgcttttttcagctggtcggtcgcgctggcctttgcaaggtcaagatccttatgtgctcgttcagcagaagcgagaccgtcagcaatttctttctgacgtttctcgatggctgccattaacggcggccatacgtacttcatgcaaaaccagacaaagagaataaacgcgatggcctggccgaggattgttgcgttaagattcacagcacaatgcctctatctagttaaccttctgatattgctcttaattcaagcaacgcttactacgcgacagcgaacatcacgtacagacccagacctacagcgatcatcgggatagcatccaccagacccataacgataaagaactgagtacgcagcagaggaatcagatcaggttgacgcgccgcgccttccaggaatttacccccgaggatgccgataccgatcgcagcaccgattgccgccagacccatcatcacagcggcagccatgtacagcagatccatattcaggttttccatgacagtctccagtttgtttcagttaaaacgtagtagtgttggtaaattaatgctcttcggacgccatcgacagatagacaatcgtcagaaccatgaaaatgaaggcttgcagcgtaataatcaggatgtggaaaatggcccacggcacattcagaatccactgtgaccaccacggcaacagaccagcaatcagaatgaaaatcagctcaccggcatacatgttgccgaacagtcgcagaccgagagaaaccggtttggacagcagacttaccccttcaaggattaagttgacaggaatgaacgcccagtgattgaacggctgcagcgtcaactcttttgcgaagccgccgatgcctttcattttgatgctgtagaacagaataaggatgaatacgcccagcgccatcgacagggtgatgttgacgtcagcagacggcaccacgcgcgttgccggcagacccagccaatgctcagcgatatacggcagcaggtcgataggcagtaagtccatcaggttcataaggaatacccagacgaaaatcgtcagggccagcggcgcaatcagcttgcttttgccatggtacatgtctttgacgctgccatgcacaaagccgactatcagctcaatcgcggtctgaaacttgcctggcacgccgctggtcgcttttttagcaacgctacggaacatcaccagaaacaacagacccagcaccaccgagaagaacatggagtcaatattgagcgtccagaaggtggctggggggttctgcggatccaccagcgagaaagtacgcaggtccaactgaaggttattcagatggtgtcctatgtattcctgcggcgtcatattttctgaagccatgatgccttttaccctttgttgttaattacagccggcgccagtatctgaaccaccagcaccaaaacccacgtaacgatcagcggcaaaaacaccgcctttaaaaccgccaacgccaccaccagtaaaaccagcatcgctaacaccttgaaggcttcaccgaaggcgaaagtccaggacacgcggcccttagcaggtgtatgcgcctggtgacgccaggcaaatatcataaacaacatattaggcagtgccactgccaatcccccacatactgcggagatgccccagaaggggtctttgaggcaaaacagcaatccacttgctattaccgccagaaactgaatgaacagaagcttacgagcaacgtttcgactcacgagcgacacagacatcacgtttttactcctgctcacttcgaggtatgccgcgtgtcgtataaaacgttctttaagacttagagtcaagcatcaaaaagcggtcaaattatacggtgcgcccccgtgatttcaaacaataagtagccaaaaggtgaataaatgtttaaatatttttctctggcccgcatttttaacttttagccaaagtgtgaacgatcgtacaaaactgcaaatagcgcgaaaacactggcgataaagcgtgcaccagatcacacattaaacatattcatgcttacgcaattcatttacgtgtcaattcatgccttttcatctttttgatatttaagcgtaaaaccaggtactgttttaaaaataccagcttacaccttaaaaacgccccattgacatttataataaaaatttaacaagcaaaagtgatttttcgattcgatttttagcagactgatatttacaaagttgattactctctgttttaacaaaagaagcgacgttgtcatgttgaaacgaaaccgtaaatccagagttaaatgtaacaacgctgaaatgcgttatacctgtcgatttttaacacaagccgcgtcgttttttttctattttttttgataaaaattaaactttgtttgacttaataatcaccagatgccgctcgccttccagttgcggaacgcgtaatttttcaacagattcgacgctaaaattgtcaggtagtgaggcaatttcatcccctggcaattgcccttttaaggcataaaaacgccctttctctcccggcagatggtggcaccagctcaccatatcattcaacgatgcgaaagcgcggctgataacgccatcaaacggcggttcggagggataggcttcaacgcggctttgaaccggcgtgatgttttccagtttcagttcgtgctggacctgacgcagaaaacgtacccgcttgcccaggctgtcgagtaaggtgaaatgcgcgtcagggagaacaatagccagcgggatgcccggcagccccggtcctgttcctacgtcgataaaacgctgtccctgaagatacggcgcaacgactatgctgtcgagaatatggcgtaccaacatttcgttgggatcccgcactgacgtcaggttgtatgctttgttccatttgtgcagcatatcaacgtaggcgaccagcagcgttttctggtgatcggtaagagaaataccggcatcagccagcagacgagagagtttgttgagcacggtcattacctgttaataatcaaatgcccgatgcgctttcgcttatcgggcctacaaatttgtagggcgggcaagcgaagcgcccccgccaaattagtgttatcaagcgctacgacgcagcataccttgttttttcagccataccagcagaatggagattgccgctggcgtaacgccggagatacgcgatgcctggccgatagacgccggtttatgatcgttcagcttggcgataacttcgttcgacagaccggaaacctgacgataatccagcgtggcaggtagcaacgtattctcgttacgtagttgtttttcaatctcatcctgctggcgagcgatatagccttcgtatttgacctggatttccacctgctcagcggcttgctcatcttcaagcgcaggcgcgaatgcggcaagcgaagtgagctgcgcgtaggtcatttccggacgacgcaacagatcttcgccgctggcctcacgggagagaggcgtggtcaaatgcgcattcacttcatcggcggattccgcagacggcgttacccatgtcgatttcagccgctgacgttcgcgttcgatattttccagcttctcgttgaagcgcgcccagcgttcatcatccaccagacccagctcgcggcccatttcagtcagacgcagatcggcattgtcctcacgtagcatcagacgatattcggcacgggaggtaaacatgcgatacggctctttggtgcccagcgtacagagatcgtccaccagcacgccgagataagcctgagaacgcgcaggcgcccagccctctttgtcggcggaaagacgcgcggcattcagaccagcgagcaagccctgcgccgcagcctcttcatagccggtagtaccgttgatttgaccagcaaagaacaggccgtgaataaatttactttccagagtcggtttcagatcgcgcgggtcgaagaaatcgtactcaatcgcgtaaccagggcgaacgatcttcgcgttctccataccctgcatggaacggacaatctgcatctgcacgtcaaacggcaggctggtggagataccgttagggtaaatctcgttagaggtcagtccttccggctcaaggaagatctgatgctggttacgatcggcaaaacgcatcaccttgtcttcgatcgaaggacagtagcgtgggccgatcccttcgatcacgccagcgtacattgggctacgatcgaggttattacgaatcacgtcatgggttttctcattggtatgcgtgatgtaacacggcacctgttgcggatgctgagaagcattccccataaacgagaaaaccggcatcgggttatcgccatgctgttgagccaacacgctgaaatcgatagtacgcgcatcaatacgcggcggtgtgccggttttcaggcggctgacgcgtagcggaagctcacgcagacggcgagacagcgggatggatggcggatcgccagcacgaccgccgctgtagttatccagaccaatatgaattttgccatccaggaaggttccgacggtcagtaccaccgctttcgcgcggaatttgagccccatttgggtcacggcgccgacaacgcgatcgttttcgacaatcagatcttcaacagcttgctggaagatcatcagattcggctgattctccagcgcggtacgcaccgcctggcggtataagactcgatccgcctgagcccgggtagcgcgaacggccggacctttgctggcgtttagtatcctaaactgaatacctgcctgatcgatcgctttcgccatcagaccgccgagcgcatccacctcttttaccagatgtccctttccaataccgccgatcgccgggttgcagctcatctgtcccaacgtgtcaatattgtgtgtcaaaagcagagtctgttgacccatacgcgctgcggccatcgcggcctcagtgcctgcatgacccccgccaataataatgacgtcaaaaggatcctgataaaacatggtaattgcctcgcataacgcggtgtgaaaatggattgaagcccgggcggtggattctactcaactttagccgatggagaaagccccgggatccgggctattaaaaagaagatctttttatttagagatctgttctattgtgatctcttattaggatcgcgccaggctgtggataacccggatcctgtaataaagatcaatgcgttggaaaggatcactagctgtgaatgatcggtgatcgtggtccgtataagctgggatcaaaacgggtacttatacacaactcaaaaagtgaacaacggttattctttggataactaccggttgatccaagctttccaccagatttatccacaatggatcgcacgatctttacacttatttgagtaaattaatccaggatccgagccaaatctccgctggatcttccggaatctcatgttcaaggatgttgatcttcagtgtttccccaacctgttttgcgccagcgcctttcagttccgcttctattttctcaatcgcgccgcaaaacgtgtcgtattctcgactgccaatgccaattgcgccgaaacgtaccgcggaaagatcgggtttctgcgtctgaaggtcttcatagaaaggggtcaggttgtccggaatgtctccggcaccgtgcgttgagctgattatcagccagatcccggaagttgacagatcctctaataacggaccgtgcaccgtttcggttgaaaaaccggcagcttccagcttttccgccagatgttccgcgacgtattcggcgccgcccagggtgctgccgctgataagagtaatgtctgccattgatcgctcgctcaggtaaagaggctgcattgtactctgtgaacgagctgggatctacctgtggaaaaatgtgggattaaaaaagccgatcatggcttgatggtgcgcatgatcgggttctgcaagacgatcagtgtctcagtggactgaatttcatcaattgtttggatcttgttgataagtacgtgctgaagcgcgtcgattgatttgcacatcacttttataaagatgctgtagtgaccggtggtgtaatacgcttccgtcacctcatccaggctttccagccgggccagtgcggagggatagtctttggcgcttttgaggatgatgccaataaagcagcccacatcgtagcccagttgtttagggctgacgtcaatccgtgcgcccgtaatgatcccggcctgcttcattttctcgacgcgaacgtgaatggttccagggctaacgccaaattgtttggccagttcggcgtaggcggtgcgggcatttcccattaaggcgtcaagtatgccgcggtccagattgtcgatctgataattttccatcgctttttcttatgcagattaatgattatctctattttagccattatttttaacgaatcaaaaccgaagttagctttttatctgttgattattgaatagtgctctcgttttgttgcttaatcataggcaacaggacgcaggagtaaaaaaatgaaaaccgcttacattgccaaacaacgtcaaattagcttcgtgaaatcacatttctctcgccagctggaggagcgtctgggtctgattgaggtccaggcgccgatcctgagtcgcgtaggggatggtacgcaggataatttgtccggctgtgaaaaagcggtgcaggtaaaagtgaaagcattgcctgacgcccagttcgaagtggtgcattcactggcgaagtggaaacgtcaaaccctggggcaacatgacttcagcgcgggcgaagggctgtacacgcacatgaaagcccttcgccccgatgaagaccgactctctccgctccactcggtctatgtggatcagtgggactgggagcgtgtcatgggcgatggcgagcgccaattttccaccctgaaaagcacagtagaggctatatgggcaggaattaaggcgacggaagcagaagtgcataaacagtttggtctggcgccgttcctgccagagcaaattcagtttgttcacagtcaggaactgctggcgcgtttcccggatctggatgcgaaagggcgcgaacgcgcgatcgccaaagaacttggcgccgttttcctggtggggatcggcggtaaactgagcgatggccaccgccatgatgtacgcgcgccggattatgatgactggagctccgcatctgagctgggctacgccggtctgaacggcgatatcctggtgtggaacccggtgctggaagatgcgtttgagctttcctctatgggtatccgcgtagatgccgatacgctgatgcgccagctggcgttgaccggtgatgaagatcgtctgcaactggagtggcatcaggcgctgctgcgcggcgaaatgccgcagaccatcggcggcgggattgggcagtcgcgtctgacgatgttgctgctgcaattgccgcatattggtcaggtacagtgcggcgtatggcccgcgcaggttcgcgaaagcattcctgctattttataagccgttagcgccgccagcgtctcagcaggcggcttcgcatcccggtgtcaaagcgccagatatgatcgaaaatgcgcatgatgccgggtttgccgtgcgccgacatcgccaccgcatggaatcgatgctggtgaagacgctgcaactctcccactttgctcaccacgtcatccggcaagcgctgggcgataaaatccgaaatgaccaccgcatcggcatcaaaccattcccgtccctgcattctttcaataatggcgcgaaaacagctggcgatatccgtgccgccgcgaaaacgttgacttaaaaagcggatggcctgctcgataccttccgggccggagagttcatagcgcacaacgtcagtggaaaacagcataataaagcagcggcggttatccgccagcgcaacgcgcatcaacgccaggcagaacgcttttgcgcactgctcgttaaatcctcccatcgagcctgaagtatcgacgcagacaataaacggtccgcgcggctgctcgtcgacatcctggtgtactaccggccgttcggtcactttctcacgccacgcttcgccatgcaggcgataggtgaggagctgtttttccactaaccggcggtaaaattcatattccagctcggtgatgccgagcgtcgccagctctggcggcaacaggcgcagaatatcatcgccttgctgaataccgtcaacctgctccggcaccgttgcgggttcgcgtaccagtgtacgaaaggtttccatcggcgcgtcttttttcggtaccgatttggcttcccgcgaacgtcccagttgttccgccagttgcattagctccggctgggcggcgagaaattcgccgtattttacgatcagttgataatcaccacgtttaagctggcccgcgctcatatcccacaggcggcctgcggcattatcattttccgccagcgtcggttccagttgcccgctcagcgtcatccgttcctgaacgtcactcagcaactgctcgcgctcttcttccagtagttgttggtttaacgtggtggcctgcacgaccagacttaaccgccagcgttgcaaaaaaagcgtgtgtagcgcaggggtaaaggtactgttgctctccgtcaactgcttcgcctgcgcggcatacggtgaatgcaggcggtgaagcaacgccagtatttgcggcagttgcacgatgaactgtggggtagagagaagttggctttgctgataacacatgacctcttccgtgagttccggcggaacgcgtgcgtctttaagacggctgcgtagcgcttcccgccagcgcgggagatcggcggtcacggcgttttttaaacgcggaaacttttcaaagaaaatgaccagttgtggggaagccagtagcgcgaggatcatctcttcgaccattccctcttcgctgacggccagcatggtatttagcgtatccagcgtcagcattgtttcgcctggcggatctgttctcctacatcctgcaggctggcctcaatgcgccctaaccagtcgctgtgaataaacaggcaatgttgctgttcgctgaagcgggtatgctgctggcgccagtcgttttctaacgtttccagctgctgtttgatctccgcaggcatactgtcttcagccgttcccggtaacgccagacgggtaccttgtagactgatgtcgcgcaccaccagatgttgagcgttatcgacttccatattcagcgtttgggcaaagccgatcccgttcagtttgccgcggatctcgccgcctttggtcagccaaagttccagcgcgctgcggtcaaaggtaatatggatcacttccatatcatgcaatttgagcggtttttgtagcaataacgtcaacgttgacgcactggcttccggcggtaaagtgtaatgcgggcgacggctgaacataccgccttctttaatgacggtgaaggcggttttatcgctttgctgttgctgcaactgaaggcgacgctggacgataccgccgaggcgagtcagcatggcctgctgctgccaggcgtgtccggtcatcaatatttccagttgctgttgcatgagattcagactctgcgcgtcataccacaagcaatcttttagcaggataaggtcaatcggcgcaaccgcgtcgcgtccgctaaagaaggcgctggcctgtaacaggcggatggctttcttccagcgacggtcggagacataaggcgcattcggcaaattatccagctgttggcgcagagtaaatatcagctcaaagaccggatcagggagtgaaatcgcgccgatatccttttgccactgttgatattcttcgtcgctaacctgtaacgaggcaggtaccgggttatcactttcatcctgctgactgaccagcatggagcggaaattggctttatcctgaactttatccagccacaggcgaatcaacattcggtcgtacaacgcttccaggctgctgtccgcttcgggcagttcgttagaggccgccaccagcagccgcatcggaattttttcctcaaatgcgccgttgcggaaatggcgttcgttaatggcggtcagcaatgtgttcaggatagctggcccggctttccagatttcatccagaaaaacgatttcggcttcgggaaggtagccggtcgttaagcgttcatagcgaccttcatctttcagcgcctgaatagagagcgggccaaaaacctcttccggcgtggaaaagcgtgtcatcagatattcaaaagcgcgggcgcgctggaaagcaaacttcaggcggcgggcaatcagactcttggcgataccgggcgggcccaacaaaaagacgctctcaccgcttaacgccgccagtaggcaaaggcgtatggcatgactacgttcatacagccccttctcaagggcgctgctcagacgggaaattctttccgctaataaatgtgggtgagccataataaagaggcgtcctttcgacaaatggatcatgctaattgcgagtatagacgtttcaccaccggggctgtaatcgtctgacgcgctgtttatttttctttgagccaggttaatctggcttcatttaggggtacgattttatgattaatcgtgcatactgtgcgcttttttgtgggccaagggactaagcacacatttcatatctatacactcattcattcaaactacatcaaggcggcaaaggagtgaatcccctggcactgacttaaacgtgtgactggggtaagcgaatgcagccgacaaggaggtagggtgaagggtgacgtgtataaacgaaagatgagtctatgagcactgataataagcaatcgttgcctgcgattaccctcgcagctattggggttgtctacggtgatattggtaccagcccgctttatacgcttcgtgaatgtttgtccggtcagtttggttttggcgttgaacgagatgccgtatttggttttctgtcgctgatcttctggctactcatctttgtggtttccatcaaatatctcaccttcgtgatgcgcgccgataacgcgggtgaaggtggaattttgacgctgatgtcgcttgccgggcgtaatacctcggcgcgcaccacatccatgttagttatcatgggactgataggcggcagctttttctatggcgaagtggtgattacgccggcgatttcggtgatgtcggcgattgaaggcctggagattgtcgcgccgcagctggatacctggattgtcccgctctccattattgtgctgactctgttgtttatgattcagaagcacggtacgggaatggtagggaaactctttgcgccgatcatgctgacctggtttttaatcctggcggtacttggcctgcgcagtattatcgccaatcccgaagtgttacatgcgctgaatcctgtctgggcggtacgttttttccttgaatataaaaccgtatcatttattgcgttgggcgcggtggtgctgtcgattaccggcgtagaggcgttgtacgccgatatgggacacttcggtaagttcccgattcgcctggcgtggtttaccgtggtattgccgtcgttagtactgaactactttggtcagggcgcattgctacttaagcatccggaagcgattaaaaaccccttcttcctgttggcgccggactgggcgttaattccgctgctgattctggccgcgctggcgacggtgatcgcctcccaggcggtcatttccggcgtcttttcgctgacgcgtcaggccgtgcgtcttggctatttgtcgccaatgcgcattatccatacctccgagatggagtccggtcagatctatatccctttcgttaactggctgctttatttcgcggtcgtggttgttattgttagctttgagcactccagcaacctggcggcggcctatggtatcgccgtgaccggcacgatggtgctgacgtctattctttctacgaccgtggcgcgtaagaactggcactggaacaaatattttgtcgcgctgatcctcatcgcattcctgtgcgtggatatcccgctgttctcggctaacctcgataaattgttgtccggcggttggctgccgctgagcctgggtctgatcatgttcacgatcatgaccacctggaagagcgagcgtttccgtctgttgcgtcgtatgcatgaacacggtaattcgctggaagcgatgattgcttcactggagaagtcaccgccggttcgggtgccgggtactgccgtatacatgtcgcgcgcgctcagtgtgatcccttttgctttattgcataacctgaagcacaacaaagtgttgcatgagcgcgtaatcttactgacgttgcgtacggaagatgcgccttatgtgcataacgttcgccgggtgcagattgagcagttgtctccgacattctggcgcgtggtggccagctacggctggcgcgaaacgccaaacgttgaagaggtgttccaccgctgcggtctggaaggccttagctgtcggatgatggaaacgtcgttctttatgtcgcacgagtcgttgattgtcggcaaacgcccgtggtatttgcgtctgcgtggcaagctgtatttgttgttgcaacgcaacgccctgcgcgcgccggatcagttcgagatcccgcctaaccgcgtgattgagttaggtacgcaggtcgagatttaacctcccatcaacatgccgggggccgcgttggcttacccggcctggccaatccgtagattcccacaagataatcgcctgatttccgctagcgaaacgtttcgacggcgatcacaattctgttacgtcatgatggttttatgaacacatccggggttacactgcggccagcgaaacgtttcgctagtggagcagaaaaatgaagaaaggcaccgtactcaactctgaaatctcgtcggtcatttcccgtctggggcatactgatactctggtagtctgtgatgcgggtttacccatcccgaatagcaccgcgcgtatcgatatggcactaacccagggcgtaccttcttttatgcaggtggtggatgtcgtgacccgggaaatgcaggttgaggcggcgattcttgcaacggaaatcaaacaacagaatccgcagctccacgaaacgttgctcactcaccttgagcaactgcagcaacaccagggaaacaccataaaaattagttatacgacacacgaacaattcaaaaaattgactgcagacagtcaggcggtgattcgcagcggggagtgttccccgtatgcgaacgtcattctttgcgctggcgtcactttctgaggccgctatggacgcattactgcaactcaaagggatcgataaagcgttccccggcgtgaaggctctctccggcgccgcgttaaacgtttatcctggccgcgttatggcgctggtgggggaaaacggcgccggaaaatccaccatgatgaaagtattaaccggcatctatacgcgagatgcgggatcgttgttatggctgggtaaagagaccacctttaatgggcctaaatcgtctcaggaagccgggatcggcattattcatcaggaactgaacctgatcccgcagttgaccattgcggaaaacatcttcctgggccgtgagtttgtgaatcgctttggcaaaatcgactggaaaaagatgtatgccgaagccgaccacctcttagccaaactcaatctgcgttttaagagcgataagctggtgggcgaactctctatcggcgatcagcaaatggtggaaatcgccaaagtgctgagcttcgaatccaaagtcatcattatggatgaaccgaccgatgcgctgaccgacactgaaaccgactctctgttccgcgttatccgcgaattaaaatcgcaggggcgcggcattgtctatatctcccaccgtatgaaagagatcttcgaaatttgcgatgacgtgacggtcttccgcgatgggcaatttatcgccgagcgtgaagtggccacgttgaccgaagattctcttatcgaaatgatggtgggacgtaagctggaagatcagtacccgcatctggataacgcgccgggtgagattcgcctcaaggtcgataatctgtgcggaccgggcgtgaatgatgtctcttttgtgctgcgaaaaggcgagattcttggcatctccggcctgatgggcgccggtcgcaccgagctgatgaaagtattgtacggcgcgatgccgcgaaccagcggttatgtgacgctcgatggacacgaagtggtgacgcgctctccgcaggacgggctggccaatggcatcgtttatatctctgaagaccgtaagcgcgatggactggtgctcggcatgtcagttaaagagaatatgtcgctgacggcgctggactatttcagccgcgctggcggaagcctgaaacacaaagatgagcagcaggcggtgggggattttatccgtctgttcaacgtcaagacgccttcaatggaacaggcgataggcctgctttccggtggtaatcagcaaaaagtggcgattgcccgcgggttgatgacgcgcccgaaagtgctcattctcgacgagccgacccgcggcgtggacgtcggcgccaagaaagagatttaccagcttatcaaccagtttaaggccgacggcctgagcatcattctggtctcatctgagatgccagaagtattaggcatgagcgatcgcatcatcgtcatgcatgaagggcatctcagcggtgaatttactcgcgagcaggccacccaggaagtgttaatggctgccgcagtgggcaagcttaatcgcgtgaatcaggagtaaaaaagatgacaacccaggctgtttctggtcgccgttatttcactaaagcgtggcttcttgagcagaagtcgctcattgccctgctggtgttgatcgcgattgtttcgacgttgagccccaacttttttaccgttaataatctgttcaatattcttcaacagacctccgttaacgccattatggcggtggggatgacgttggtgattctgacatcggggatcgatctgtccgtcggttccctgctggcgctcaccggtgcggttgccgcttcaatcgtcggcgttgaagtgaatgcgctggtcgcggttgccgccgcgctggcgctgggcgctgcgattggcgccgtcactggcgttatcgtcgcgaagggccgcgtacaggcgtttatcgctacgctggtgatgatgctgctactgcgtggcgtgacgatggtttacaccgacggtagcccggtcaacaccggctttaccgataacgccgatctgtttggctggttcggtatcggtcgtccgctgggcgttcctacgccggtctggatcatggctatcgtctttatcgccgcctggtatatgctgcatcacactcgtctgggacgctatatctacgcgctgggcggtaacgaagcggcgacgcgtctgtctggcattagcgtgagcaaagtgaaaattatcgtctattcactttgcggcctgacagcatcgctggcgggcatcattgaagtggcgcgcctctcttccgcgcagccgacggcgggtaccggctatgagctggatgctattgccgccgtggtgctgggcggcaccagccttgcaggtggtaaagggcgcattgttgggacattgatcggcgcattgattctcggcttccttaataatggtttgaatttgttaggtgtttcctcctattaccagatgatcgtcaaagcggtggtgattttgctggcggtactggtagacaacaaaaagcagtaacaacgactacaggacatctgaaatatgaacatgaaaaaactggctaccctggtatctgctgttgcgctgagcgccaccgtgagcgcgaatgcaatggcgaaagacaccattgcgctggtgatctctaccctcaataatcccttcttcgtgtcgttaaaagacggggcgcaaaaagaggcggataaactgggttataacctggtggtgctggactcccagaacaaccctgccaaagagctggcgaacgtgcaggatttaaccgttcgcgggaccaaaattctgctgatcaacccgactgactccgatgcggtgggtaacgcggtgaagatggcgaaccaggcgaagattccggttatcacgcttgaccgccaggcaaccaaaggcgatgtcgtcagccatatcgcgtctgataacgtgctgggcggtaagatcgctggcgactatatcgcgaaaaaagctggcgaaggcgccaaagtgattgagttgcaaggcattgccggaacatctgcggcgcgtgagcgtggcgaaggtttccagcaggcggtagccgcccacaaatttaatgtcctggccagccagcctgctgatttcgaccgtactaagggtctgaacgtcatgcagaacctgctaaccgcgcatccggatgttcaggctgtcttcgcccagaacgatgaaatggcgctgggcgcactgcgcgcactgcaaactgccggtaaagcagatgtgatggtggttggatttgacggtacgccggatggcgaaaaggccgtaaaagatggcaaactggcagcgactatcgctcagttaccggatcaaatcggcgccaaaggcgttgaagtggcggataaggtgttgaaaggcgaaaaagttcaggccaaatatccggttgacctgaaactggtcatcaagcagtaataaacgacacgggtcaactatggcctgatggcgacagaaatacgcgagcctccgctgaggtgaacgtaaaaaaaagaaaagcagggcacgcgccaccctaaccggtggcgcactttgacgtggaaccccgaatatgaaaaccgcaggtaatctcatcgtccttggcagcattaatgccgatcatatccttaatcttgagtccttccctaccccgggtgaaacggtaaccggtagccattatcaggtcgcgtttggtgggaaaggcgcgaatcaggcggttgctgcgggacgtagcggggcaaatattgcgtttatcgcctgcacgggcgatgacgatattggcgacagtattcgtaaacaattagtcagcgatcgtattgatatcgcgccagttagcgttattaaaggcgagtctaccggggtggcgctgattttcgttaatggcgaaggcgagaacgtcatcggtattcatgccggagcgaatgccgcgttatcgccggcgttggttgatgcgcagcgtgaacgtatcgcgcaggcggatgcgttactgatgcaactggaatcgccgctggaaagcgtactggcggcggcgaaaatcgcccatcaacatcatactactgttgcgcttaatccggcgcctgcccgtgagttaccggatgaactgctggcgctggtggacatcatcacgccaaatgaaacggaagctgaaaagctgacgggcgtgcgtgtggaaaatgacgacgatgccgcgaaagctgcgcaggttttgcatgataaaggcattcgaaccgtattaattaccttaggaagccgtggcgtctgggccagcgtagacggcgagggccgccgcgttcctggatttagcgttgaggctgtcgataccattgctgccggagatacgtttaacggcgcctttatcaccgcgatactggaggagacgccgttgccggaagcgattcgctttgcccatgccgccgccgcgattgccgtaacgcgtaaaggcgcgcaaccttccgttccgtggcgcgaagagatagaagcgtttttacatcagcaggggtaacgcttggctactatgaaagatgttgcccgcctggcgggagtctctacatcgacggtctctcacgttattaacaaagatcgctttgtgagtgagacgataaccgaaaaagttgaagcggcgattaaatcgctcaactatgcgccttctgcgctggcgcgaagcctcaagttaaaccagacccgcacgattggtatgctaattaccgccagtaccaaccctttttattccgaactggtgcgcggcgttgagcgaagctgttttgagcgcggttatagtctggtgctgtgcaataccgaaggcgacgagcaacggatgaaccgcaacctggagacgctgatgcaaaaacgggtagacggtttactgctgctgtgtaccgaaacgcatcagccttctcgtgaaatcatggagcgttatccgtctattcctaccgtcatgatggactggtcgccgtttgatggtgagggcgatagcgatctcattcaggataattcgttgctaggcggcgatcttgctacccaataccttatcgataaaggatttacccgaatagcctgtattaccggcccgctggacaaaacgccagcgcgtttacggctggaagggtatcgggcggcgatgaaacgcgcagggctggctattccgcaaggctatgagatcaccggcgattttgaatttggcggcggctttgacgccatgcaggcgttactcgcccatcaacagcgaccgcaagcggtttttaccggaaacgatgcgatggctgtcggcgcctatcaggcgctatatcaggcggggcttcgtattccgcaggatatggcagtcattggctatgatgatattgagctggcgcgctatatgacgccgccgctgacgactatccatcagccgaaagatgaattgggcgagctggctattgatgtgttgattcatcggatggcgcagcccgccttgcaacaacagcgacttcagcttactccggttttgacggtgcgtgggtcggtttagatttatgccgttctttaatcagattgttgccgtctttggctcttagcagcataaacatcagcgcggacacgatagtgatcgcccccatcgtgataaaggtatagtggaactgttccacggtactggtgcccgcaaaaccttcataaatacgtaacaccgccgcgctgatcgccacgcctaaactgatagacaattgctgcgtaaccgccagaacgctgttgccgctgctggcattatcgtccgtcagatccgcaagagtaatcgtattcattgccgtaaattgagtggacatcgccattccaagaatgaatagcggcagcacgagcatccagatcggcatggcgggagattgaaacgaaaactgggcaatcatcagaccgataaataccgtaatgccgaccagagtcttccggtatcccaaacgtcgtaaaacctgcgttacggtcgatttcgcgataatagaacccaaagccgtcggcgccatcatgcagccggcgatcagagccgggtagccaaaaccaacctgtagcattaacggcatcaaaaaaggtacgcagcctgtccccagacgcgtggcgaggttgccggcaataccgacggaaaatgtgcgtgtcttaaacagcgatagtgatattaacggtgtcggatgacggcgggcgtggcggatataggccaatagtagaacgatactgcaaaaaataatggcggatgcgatccatgtcgccacaatcttttcgccaaacagttccattccgctggaaaataaaaccagacttaacccaaaaagaaagaagccggtcatgtcaaacttgcgacgcggcgtggtgaagttgggcatatatttgcgggcatacagaatgcctgcaacaccaatgggaatattaatcaggaagatccagtgccagcttgcccaggtcaccagtacgccgcctaataccggccccagaatcggacctaccagccccggcatagtgacaaagttaagaacgggcagcagctcactacgcggataggctcgcaataacgccagccgcgccactggcatcatcatcgctccgccgacgccttgtacgacgcgaaaaataaccaattcagatagtgaactggagagcgcgcaggccagcgagcctaacgtaaacagacttacggcaaccataaaaacgcgacgcgtaccaaagcggtcagccagccagccgcttaccggaattaacatagctactgtcagggtataactgataatagcggactgcatggcgagtggtgaacggttaagactatgcgcaatagccggtaaagcggtattcaaaatggtggcgtctagcgcctgcataaagaaggccatcgccgcgatccacggcaggccagccatactgcgcgcttttttgctggtcattcaatatcctgttaattatctggtctctcattgggcgctattaacaacgcctggcaggcctggaaagcgcgttcgccgtcgccatcagcgatggcatcaacaatggcctggtgcaaatccagctttaccacctcgttataggtgattgaggtaaagtaagtgtgataaaccgaatgaaatagcgtcgcaaaagagattagaaagggattggcgctcatttcgtagatatgctcgtgccacgccatatccacttcaatccagcgttcacgcttaaaatgctttttcagcgcgaccatctcttccattaaggcattaagccgcgctttctgctccggtgtgccaagagtcgccgccagcaggcaggcttgcggctccaggctaatacgcatcaccagaaaatgctctaccacctgatgaaaattttcttccgtcatccaccaggtcagcagctcttgatccagaaagttccagtttccctgcggcatcacccgcgtaccaatgcgcggacgaggtagcaccatacctttagccgtcaacgttttcaccgcttcgcgaactgccgttcgacttacgccgtactgctcgcccagttctatttcgccgggaagaatcgtaccgggggcgtagtcaccctttaatatccgctgcgccagcttttcagccagaacataggatagatttttctgtgcggctaattgttgtgcgcttaaaggcatgaatgttcttcctttctctttcgtttggttattagtatgccacctggaagtgtgattgcagttgcaataacggcaatttgcttattttatggcacgttaagcacgctattgatgaaaaaagagacactcagaaaattattttaaatttcctcttgtcaggcagaaataactccctataatgcgccaccactgacacggaacaacggcacacaggccgccgggtcagcggggttcagaccagaacctcacggagaaaagcgaaaataaacgcttgactctgaagcgggaaagcgtaatatgcacaccccgcgccgctgagaaaaagcgaagcggcactgctctttaacaatttatcagacaatctgtgtgggcactcgaagatacggattcttaacgtcctaggacgaaaaatgaataccaagtctcaagagtgaacacgtaattcattacgaagtttaattcattgagcatcaaacttttaaattgaagagtttgatcatggctcagattgaacgctggcggcaggcctaacacatgcaagtcgaacggtaacaggaagcagcttgctgcttcgctgacgagtggcggacgggtgagtaatgtctgggaaactgcctgatggagggggataactactggaaacggtggctaataccgcataacgtcgcaagaccaaagagggggaccttcgggcctcttgccatcagatgtgcccagatgggattagcttgttggtgaggtaacggctcaccaaggcgacgatccctagctggtctgagaggatgaccagccacactggaactgagacacggtccagactcctacgggaggcagcagtggggaatattgcacaatgggcgcaagcctgatgcagccatgccgcgtgtatgaagaaggccttcgggttgtaaagtactttcagcggggaggaaggtgttgtggttaataaccgcagcaattgacgttacccgcagaagaagcaccggctaactccgtgccagcagccgcggtaatacggagggtgcaagcgttaatcggaattactgggcgtaaagcgcacgcaggcggtctgtcaagtcggatgtgaaatccccgggctcaacctgggaactgcattcgaaactggcaggcttgagtcttgtagaggggggtagaattccaggtgtagcggtgaaatgcgtagagatctggaggaataccggtggcgaaggcggccccctggacaaagactgacgctcaggtgcgaaagcgtggggagcaaacaggattagataccctggtagtccacgccgtaaacgatgtctacttggaggttgtgcccttgaggcgtggcttccggagctaacgcgttaagtagaccgcctggggagtacggccgcaaggttaaaactcaaatgaattgacgggggcccgcacaagcggtggagcatgtggtttaattcgatgcaacgcgaagaaccttacctggtcttgacatccacagaagaatccagagatggatttgtgccttcgggaactgtgagacaggtgctgcatggctgtcgtcagctcgtgttgtgaaatgttgggttaagtcccgcaacgagcgcaacccttatcctttgttgccagcgattaggtcgggaactcaaaggagactgccagtgataaactggaggaaggtggggatgacgtcaagtcatcatggcccttacgaccagggctacacacgtgctacaatggcgcatacaaagagaagcgacctcgcgagagcaagcggacctcataaagtgcgtcgtagtccggattggagtctgcaactcgactccatgaagtcggaatcgctagtaatcgtggatcagaatgccacggtgaatacgttcccgggccttgtacacaccgcccgtcacaccatgggagtgggttgcaaaagaagtaggtagcttaaccttcgggagggcgcttaccactttgtgattcatgactggggtgaagtcgtaacaaggtaaccgtaggggaacctgcggttggatcacctccttaccttaaagaactgttctttgcagtgctcacacagattgtctgatgaaaagtaaatagcaaggcgtcttgcgaagcagactgatacgtccccttcgtctagaggcccaggacaccgccctttcacggcggtaacaggggttcgaatcccctaggggacgccacttgctggtttgtgagtgaaagtcacctgccttaatatctcaaaactgacttacgagtcacgtttgagatatttgctctttaaaaatctggatcaagctgaaaattgaaacacagaacaacgaaagttgttcgtgagtctctcaaattttcgcaacacgacgatgaatcgaaagaaacatcttcgggttgtgaggttaagcgactaagcgtacacggtggatgccctggcagtcagaggcgatgaagggcgtgctaatctgcgataagcgccggtaaggtgatatgaaccgttataaccggcgatacccgaatggggaaacccagtgtgattcgtcacactatcattaactgaatccataggttaatgaggcgaaccgggggaactgaaacatctaagtaccccgaggaaaagaaatcaaccgagattcccccagtagcggcgagcgaacggggaggagcccagagcctgaatcagcatgtgtgttagtggaagcgtctggaaaggtgcgcgatacagggtgacagccccgtacacaaaagcgcatgtgctgtgagctcgatgagtagggcgggacacgtggtatcctgtctgaatatggggggaccatcctccaaggctaaatactcctgactgaccgatagtgaaccagtaccgtgagggaaaggcgaaaagaaccccggcgaggggagtgaaaaagaacctgaaaccgtgtacgtacaagcagtgggagcacaggtttacctgtgtgactgcgtaccttttgtataatgggtcagcgacttatattctgtagcaaggttaaccgtataggggagccggagggaaaccgagtcttaaccgggcgttaagttgcagggtatagacccgaaacccggtgatctagccatgggcaggttgaaggttgggtaacactaactggaggaccgaaccgactaatgttgaaaaattagcggatgacctgtggctgggggtgaaaggccaatcaaaccgggagatagctggttctccccgaaagctatttaggtagcgcctcgtgaattcatctccgggggtagagcactgtttcggctagggggccatcccggcttaccaacccgatgcaaactgcgaataccggagaatgttatcacgggagacacacggcgggtgctaacgtccgtcgtgaagagggaaacaacccagaccgccagctaaggtcccaaagtcatggttaagtgggaaacgatgtgggaaggcccagacagccaggatgttggcttagaagcagccatcatttaaagaaagcgtaatagctcactggtcgagtcggcctgcgcggaagatgtaacggggctaaaccatgcaccgaagctgcggcagcgaacgtatcacccaagacaactttacggagttgacgattgacggagcgaagcgacgtcaaagcgttcattaaagtcgagttggcttagggatacgttcgttgggtaggggagcgttctgtaagcctgtgaaggtgtgtcgtgaggcatgctggaggtatcagaagtgcgaatgctgacataagtaacgataaagcgggtgaaaagcccgctcgccggaagaccaagggttcctgtccaacgttaatcggggcagggtgagtcgacccctaaggcgaggccgaaaggcgtagtcgatgggaaacgggttaatattcccgtacttggtgttactgcgaaggggggacggagaaggctatgttggccgggcgacggttgtcccggtttaagcgtgtaggtgtgtgttccaggtaaatccggttcactttaacactgaggcgtgacgacgaggcactacggtgctgaagcaacaaatgccctgcttccaggaaaagcctctaagcatcaggtaacacgaaatcgtaccccaaaccgacacaggtggtcaggtagagaataccaaggcgcttgagagaactcgggtgaaggaactaggcaaaatggtgccgtaacttcgggagaaggcacgctgacacgtaggtgaagtgatttactcatggagctgaagtcagtcgaagataccagctggctgcaactgtttattaaaaacacagcactgtgcaaacacgaaagtggacgtatacggtgtgacgcctgcccggtgccggaaggttaattgatggggtcagcgtaagcgaagctcctgatcgaagccccggtaaacggcggccgtaactataacggtcctaaggtagcgaaattccttgtcgggtaagttccgacctgcacgaatggcgtaatgatggccaggctgtctccacccgagactcagtgaaattgaactcgctgtgaagatgcagtgtacccgcggcaagacggaaagaccccgtgaacctttactatagcttgacactgaacattgagccttgatgtgtaggataggtgggaggctttgaagtgtggacgccagtctgcatggagccgaccttgaaataccaccctttaatgtttgatgttctaacgtggacccgtaatccgggttgcggacagtgtctggtgggtagtttgactggggcggtctcctcctaaagagtaacggaggagcacgaaggttggctaatcctggtcggacatcaggaggttagtgcaatggcataagccagcttgactgcgagcgtgacggcgcgagcaggtgcgaaagcaggtcatagtgatccggtggttctgaatggaagggccatcgctcaacggataaaaggtactccggggataacaggctgataccgcccaagagttcatatcgacggcggtgtttggcacctcgatgtcggctcatcacatcctggggctgaagtaggtcccaagggtatggctgttcgccatttaaagtggtacgcgagctgggtttagaacgtcgtgagacagttcggtccctatctgccgtgggcgctggagaactgaggggggctgctcctagtacgagaggaccggagtggacgcatcactggtgttcgggttgtcatgccaatggcactgcccggtagctaaatgcggaagagataagtgctgaaagcatctaagcacgaaacttgccccgagatgagttctccctgagacttagagtctcctgaaggaacgttgaagacgacgacgttgataggccgggtgtgtaagcgcagcgatgcgttgagctaaccggtactaatgaaccgtgaggcttaaccttacaacgccgaagatgttttggcggttaagagaagattttcagcactgattcagattacatcagaacgtaaaaacggtctgataacagaatttgcctggcggcactagcgcggtggtcccacctgaccccatgccgaactcagaagtgaaacgccgtagcgccgatggtagtgtggggtctccccatgcgagagtagggaactgccaggcatcaaattaagcagtaaactgatgtaaaaatcagtggttgtaaaagaattcggtggagcggtagttcagttggttagaatacctgcctgtcacgcagggggtcgcgggttcgagtcccgtccgttccgccaccctaattaggggcgtagttcaattggtagagcaccggtctccaaaaccgggtgttgggagttcgagtctctccgcccctgccagaaataatccttagcatctgctaaggatttttttttgcctaaaattacctgattatctgatcaggtaatcgtaagttcccttctttttcttttcatcattttcattgttcatccagcacatccgtttttaacagatcgcagatcagcgagtatttatcgctgttttgcagccaaatagcgtatagtggccgtgaaagcgttgcgctgtcggcaacggtatgtaatccgcccttttcatttgcccagtttacaggaagccagctacagccatttaatgcgctaagctgctgtcgggcgagttcggctgagctggttgttaataccggcacttcatctgctgcgatcagccctgtttcatgctgttggaagtctggtccccactccagccgcagataattgagttctgatttcttacgggcagggctgctgcaatataacgccaaagtgaagtgccctaacagctgactgctgaactcatccattttgggcgcttcggtagtaatgaggagatcaagctggcgttcatgaagttgcttcacaagcgattgccgttgagcgattctggcttcgaactgcaggccgctttgcggctcctgtagttggtacagtcgccccagccaggcgttaagcatacactcccataaagacgcgctggcgccgatggaaaactcgttatggcgtgaggtatgcgccacctctttacgtgccgcctgccacgtattcatcagcgtttccgcatacggtaaaagtttttcgccagccgtggttaaacggatattgtttctgtgccgcgtaaaaaggtttacgcccagttgattctccagttgcctgatacgaaagctcaccgcggattgcgtcaggtaaagtgcttctgcggcccgcccgaaatggcgtgtccggctaacttccaggaaagtttttaacaattccgtatccactgtgctctccacaaaattatttgtcgttatgatttaaatgttttgttttacactctgtcaagcgtaactaatactccgcgccataaatagctcagacaaagaattaggagcgtgcaggatggcggaaagctttacgacgactaatcgatattttgacaataaacattatccacgtggattctctcgtcacggtgatttcacgattaaagaggcacaactgcttgagcgtcatggtcatgcctttaatgatctggatcttggcaagcgtgagcctgtgactgaagaagagaagctgtttgtagcggtatgtcgcggtgaacgcgagccggtaacggatgcagaacgcgtctggtccaagtatatgacgcgtatcaagcgtccaaaacgcttccacaccttgtctggcggcaagccgcaagttgaaggcgcagaagactacaccgaagctgatgattaataaaaagggcgtaatgccctttttttacgccaacagcttttgcaaatgaattaacaacctgtctatcgcccgatagcttaccgcctcctgcaaatgctgacgcgagatctggtcagccagttctatgtcggcaatggttctggcaacttttagtaaacgctgccaggcgcgaatggataatccaagatgcaccagcgtgtcttcaagccagcgggcgtcatcgtgatgcaaaacacaatatttttggatttcgcgaccctccagacgcgcgtttaacttcttctggcgtcggtactgccgttcatgggcggcgatgacccgcttttttaccgtagcgctgctctcaccctttgaggcgtgttggctaagaatcccgggcggtggaagcggtatctcaagcgaaaggtcaaaacgatcaagaaacgggcctgacaaccgattaaggtaacgtagtgtctgttctggcgtgcagcgattatggtttccctgataatgtccggtcgggctgggattcattgcggcgattaactggaacctggcagggtacgttattttcgctctggtacgggataaatgaatttgaccggattctataggttcacgtagcgcatccagtgtgcgtcgttcaaattcaggcaattcatcaaggaacaaaattccgttgtgcgccagcgatatctctcccggggcgggtattgcgccgccgccgaccatagcagtaagtgaggcgctatgatgaggtgagcgaaaggggcgttgctgccatcgtttttgtaccgtatcggcattaaccagactgaggatcgcggcgctttccaacgcctcctcattgcttaatggtggaagaatcccgctcagtcgactggccagcatggttttacccgtacccggcgggccgatcaatagcagattatgtccccctgccgctgtaatctccaggccgcgtttaccctgctcctgaccgatcacatcgcgaagatcggcagttgcggtaggcgatgccatatcctgagctaaaggtctttccagggcgtgtttcccttccagaaaggcgcagacggtttgtagatgatcggcgataaaacatccttctttgcttataagcccaacctccgccgcgttctctgttgcgacgataatatttctgccggccctgatggcttccgttgcacttgatattgcgccaggaacgccgcgtaatgcgcctgtaagcgctaactcacccaccagctcatatgcctcaagattcgacgctgtaagctgctcagacgcggccagaagcgcaacagcaataggcaggtcataccttccaccctctttcggtagatcggctggagcaaggttaatggttatttttttagccggaaattcatatccgctattaataatcgcactacgtacccggtcacgcgcctcttttaccgtggtttccggtaggccaaccatggttaatcccggtaatccattactgatatgcacctctatagtgataggcggcgcattgacgccaagtgcggcgcgggtatgaacaatcgccagtgacataatccctcctgttacgtggattatgcggaatagaagagaaaatcgaattactgactttttgttttttagcgactgcttcctgaattttggcgtcattttcaggtaagaaacatcaaactggaagaacgctcgcagaagcgaaaagaaggaaaacaggatgtagagtgcgccaaaagggggaggaaaacgtgaaaatttttcagttgctaatttttcttataaaaaacaaagtacttttaggcattcacctgcattatctgaaacgtggttaaaaaaatatcttgtgctattggcaaaacctatggtaactctttaggtattccttcgaacaagatgcaagaatagacaaaaatgacagcccttctacgagtgattagcctggtcgtgattagcgtggtggtgattattatcccaccgtgcggggctgcacttggacgaggaaaggcttagaaatcaagccttaacgaactaagacccccgcaccgaaaggtccgggggttttttttggcctgaaaaacttaagcgaggagcagagcgtgaataacagcataaaattctgtttctcaagatttacgacggggatgtaactatgaacggggcacagtgggtggtacatgctttgcgagcgcagggggtgaaaaccgtatttggttatcctggcggcgcaattatgccggtttacgacgcgttgtatgacggtggtgtggagcatttgttgtgccgacacgagcagggtgcggcaatggcggcaatcggttatgcccgttctaccggcaaaaccggtgtttgtatcgccacttccggccctggcgccactaacctgatcactggcctggcggatgcgttgttagattcggtccccgtcgtcgcgatcacgggtcaggtttccgccccgttcatcggcaccgatgcgttccaggaggtggatgtgttagggctgtcgctggcctgtaccaaacacagcttcctggtgcagtcgctggaagagttgccgcgcatcatggcggaggcttttgaagtcgccaacgctggccgtcctggcccggttctggtggatatcccgaaagatatccagttggccagcggtgagctggaaccctggtttactaccgttgctaacgaagcgactttcccgcaggctgatgtggaacaggcgcgccagatgctggaacaggcgaaaaaacccatgctgtacgtcggcggtggtgttggtatggcgcaggcagttccggcgctgcgtaaatttatcgcggtaacgcaaatgccagttacctgcacgctgaaagggctgggggctgttgaagctgattatccgtactatctgggcatgctgggaatgcacggtactaaagcggctaatttcgcggtgcaagagtgtgatttactgatcgcagtgggtgcacgttttgatgaccgggtgaccggtaagctgaatacgtttgcgccgaacgccagcgtaatccatatggatatcgacccggcggaaatgaacaaactgcgtcaggcacacgtcgcgttgcagggcgatttaaattcgctgttgccggcattacagcaaccgctgaagatcgacgcatggcgtcagtcctgtgcagagctgcgcgcagaacacgcctggcgctatgaccatcctggcgagactatctatgcgccgttgttgttgaagcaattgtcggaacgcaaacccgcagacagcgtggtgacgacggatgtggggcagcatcagatgtggtcagcccagcatatgacttacacccgcccggagaacttcatcacctccagcggtctggggacgatgggattcggcttaccggcggccgttggcgcgcaggtagcgcgaccgaatgataccgttatctgtatctccggtgacggctccttcatgatgaatgttcaggagttgggcaccgtaaaacgcaagcagttaccgttgaagatagtcttactcgacaaccagcggttagggatggttcgacaatggcagcaactgtttttccaggagcgatatagcgaaaccaccctgaccgataaccccgatttcctcatgctggccagcgccttcggcattccaggccagcacattactcgtaaagaccaggttgaagcggcactcgacacgatgttggcaagcgaagggccgtacctgcttcacgtctcaatcgacgaacttgaaaatgtctggccgttggtgccgcctggcgccagtaactctgaaatgctggagaaattatcatgatgcaacatcaggtcaatgtatcggcacgctttaatccagaaaccttagaacgtgttttacgcgtggtgcgccatcgtggttttcaggtgtgctccatgaatatggaagccgcgaccgatgcgcagaatataaatattgaattgaccgttgccagtccccggtcggtcgacttactgtttagtcagttaagtaaactggtagatgttgcgcatgtcgcgatctgccagagcgctgccacatcacaacaaatccgcgcctgagcgcaaaaggaagaaaaatgacgacgaaaaaagctgattatatttggttcaatggcgagatggtgcgctgggaagacgcgaaggttcacgtaatgtctcacgcgctgcactacggtacgtcggtatttgaagggattcggtgctacgactctcacaaaggtccggtagtgtttcgtcatcgtgaacatatgcagcgcctgcgcgactcagcaaaaatttatcgttttccggtttcccagagcattgatgagctgatggaagcctgccgcgacgtaattcgtaaaaataatctgaccagcgcctatatccgtccgttggtatttgtcggcgatgtcggtatgggcgttaacccgcccccgggatacaccactgacgtcatcatcgccgcgttcccgtggggggcatacctgggcgccgaagcgctggatcaggggatcgatgcgatggtttcttcctggaaccgcgctgcgccgaacaccattccgaccgccgccaaagcgggcgggaactatctttcctcactgctggtgggtagcgaagcgcgccgccacggctatcaggaaggcatcgccctggatgtaaacggctatatctccgaaggcgcaggtgaaaacctgtttgaggtaaaagatggcgtgctgtttactccgccgtttacctcttccgcgctgccaggcattactcgcgacgcgattatcaaactggcgaaagagctgggtattgaagtgcgcgagcaggtgctgtcccgtgaatcgctgtatctggccgacgaagtgtttatgtccggaaccgcggcagaaattactccggtacgcagcgttgatggtatccaggtaggtgaaggccgttgcggccctgttaccaagcgtattcaacaagccttctttggtctcttcactggagaaaccgaggataaatggggctggttggatccggtaaattcataataaataaaattaatattttcccaaaataatttgcgtcacaggaaggcggtaacgcagcgaatccccagaagcttactgtagtaagtgactggggtgagtgaggcagccaacgcacctgtggcgtgaagtatgaagggaaaagatggggagtaaataaagcatgcctaagtaccgttccgccaccaccactcatggtcgtaatatggcgggtgcccgcgcgctgtggcgcgccaccggaatgaccgacagtgattttggcaaaccgattatcgccgtggtgaactcattcactcagtttgtgccgggtcacgttcatctgcgcgatctcggtaagctggtcgccgaacagattgaagcttccggcggggtggcgaaagagttcaacactattgccgtggatgacgggattgccatggggcacgggggtatgctctattcactgccgtcgcgcgagctgatcgccgactccgttgagtacatggtgaacgctcactgcgctgacgcgatggtgtgtatctccaactgcgacaaaatcaccccagggatgctcatggcctcgctgcgcctgaatattccggtgatctttgtctccggcggcccgatggaagccgggaaaaccaagctttcagacaaaattatcaagctggatctggttgatgccatgattcagggagcggacccgaaagtctctgacgatcaaagtaaccaggttgaacgctccgcctgtccaacctgcggctcctgctccggcatgtttaccgctaactccatgaactgcctgaccgaagcgctgggcctgtcgcagccgggcaacggctcgctgctggcaactcacgctgaccgtaagcagttgttcctcaatgccggtaagcggattgttgaactgactaaacgctattacgagcaaaacgacgaaagtgcactgccgcgtaacatcgccagcaaagccgcgtttgaaaacgcgatgacgctggatatcgcgatgggcggttcgaccaacaccgttcttcacctgctggcggcggcgcaggaagcggaaatcgacttcaccatgagtgatatcgacaagctgtcccgcaaggtgccgcagctgtgtaaagtggcgccaagtacccagaaataccatatggaagatgttcaccgtgccggcggtgtgctgggtattttaggcgagctggatcgcgccgggctgctgaaccgcaacgtgaaaaacgtattaggcctgacgttgccgcaaacgctggaacagtacgacatcacggttacgcaggacgaagcggttaaaaaaatgttccgtgctggccctgccggtatccgtactacccaggcgttctcgcaggattgtcgctgggattcgctggatgacgaccgcgcagcgggttgcatccgctcgctggaatatgcctatagcaaagacggcggtctggcggtgctgtatggcaacttcgccgaaaacggctgcattgtgaaaaccgcaggcgtggatgacagcatccttaaatttaccggcccggctaaagtgtatgaaagccaggacgacgcggtagaggcgattctcggcggcaaagtagtggaaggcgatgtagtcgtgatccgctacgaagggccgaaaggcgggccgggaatgcaggaaatgctctatccgaccagtttcctgaagtcgatggggctgggcaaagcctgcgcgctcatcaccgatgggcgtttctccggcggtacttcgggtctttccatcggccacgtctcgccggaagcggccagcggcggcactattgcgttgattgaagatggcgacactattgcgattgatatcccgaaccgcagcattcagttgcagttgagtgaggctgaaatcgccgcacgccgcgaggcgcaggaagctcgtggcgacaaagcctggacgccgaaaaatcgtcagcgtcaggtttcgtttgccctgcgtgcctacgccagcctggcgaccagcgccgataaaggcgcggtgcgcgataaatcgaaattgggaggttgatgatggcggaatctcaacctctgtcagtcgcgccggaaggggcggagtatctgcgcgcggtgctacgcgcgccagtatacgaagcggcgcaggtgacaccgctgcaaaaaatggaaaagctctcgtcacgtctggacaacgttattctcgtcaaacgcgaagaccggcagccggtacatagctttaagctgcgcggcgcttacgcgatgatggccggattgaccgaagaacaaaaagcccacggcgtgattaccgcgtcggcggggaaccatgcacagggcgtggcgttttcctccgcgcggcttggcgtgaagtcgctgatcgtcatgccaaaagcaacggcggatattaaagtcgatgcggtacgcggttttggcggcgaagtgctgttgcacggcgctaattttgatgaagcgaaagcgaaagctattgaactggcgcagcagcagggttttacttgggtgccgccgtttgatcacccaatggtgatcgccgggcagggcacgctggcgctggaactgcttcagcaggattcgcatctcgatcgtgtctttgtgccggttggcggcggcggcctggcggcgggcgtagcggtactgatcaaacaattgatgccgcaaatcaaagtgattgccgtcgaagcggaggattccgcctgcctgaaagcggcgttggaagccggtcatccagtggatctcccgcgcgttgggttgtttgctgaaggcgtagcggtaaaacgcatcggcgacgaaaccttccgcctgtgccaggaatatctcgacgacattattacagtcgatagcgacgctatctgcgcggcgatgaaagatctgtttgaagatgtgcgtgcggtggcggagccgtccggcgcgctggcgctggcggggatgaagaaatatatcgcccagcacaatattcgcggcgaacgcctggcgcacgtcctttccggcgccaacgtcaacttccacggcttgcgctatgtgtctgaacgctgcgagctgggggaacagcgcgaagcgttactggcggtgaccattccggaagaaaaggggagctttctcaaattctgccagttgcttggcgggcgtatggtcaccgaatttaactaccgttttgccgacgcgaaaaatgcctgtatttttgtcggcgtacgcgtcagtcaggggctggaggagcgaaaagagattatcacccaactgtgcgacggcggttatagcgtagtggatctctccgacgatgaaatggcgaagctgcatgtgcgctatatggtcggcggacgcccctccaagccattacaggagcgtttgtatagtttcgaatttccggagtcgcccggcgcgttgctcaaattcctgcatacgcttggcacgcactggaatatttcgctattccattaccgtagccacggtaccgattatggccgcgtgctggcggcgttcgagttaggcgatcatgagccggatttcgaaacccggctgcatgagctgggctatgaatgccatgatgagagcaataacccggcgttccggttctttctggcgggttaattcagcgtttagtttttcgggcccacaaagtaaagtgggcctgatatccagatattatcttccctcagttattgggcttttctgccagcccggagcatccactcatttcattttgcgagacgttttccagaaggcgcccaatctgcttgtggtgaaactcggctcaccatatcgttagcaccgccatcacttgcacctgctaaaaacaatgtataaaattttatacacaaaggatgttatgttactcactcgagctctctccaatgaaaaagaaattcgatgagtgggatcttctctggaggatctcctggcttttcccataacggtacgtaaagcagtcggttatcagcttcacaaaattcagtatggaattgaacccgatgactggaaaccgttttcagaaattggggctggggtaaatgaaattcgtattcgtgacaacaatggtatctatcgcgttatgtatgtcgctaagtttgaagaagcactctacgttttgcatagtttccaaaaacagacgcaacaaaccagtcagcatgataaaaacatcgccagaacgcgttataaccgggtggtgcaacaacggagaaacagcttgtgattgccaaaactgatagtgatattcgccatgtgacgccatctggcggtaatgtttttgctgatttggggtttcataagcaggacgcagaaaagttttacgctgattccctgaatgaaatcgaaaacacgttagccattaaacaacagctaatggaagaaattaccctctggattacgcaaaaccagatgaagcaagccgaggttgctacagttttgcatatatcccgaccgcgcgtttcggatgtcgtcaacaagaaatgcagcaaattcaccattgatgctctggtgaatatgcttagccgtattgggaagcctgttcgggtaatggtagggccgtaaaactaattcggtaaaatcttccagaacgcatcaattagcggctcatgcagccgctttttttgcgcgcagacgccgagttcaaacggcgttttttcatcgctgcgttctaaaatcatcacccggttgcgcactggctccgggctgttttccagcaccacttccggcagcagcgccacgccgcagcccagcgccaccattgagaccatcgcttcgtgaccgccgacggtggcgtaaatctgcggattgctgattttatgccggcggaaccatagctcaatgcgacggcgtaccggcccctggtcggccatgataaacggcaccgtcgaccagtctggcttgtcgaccgaaacctgattacgcaccgggcagggcagcgccggggcgatcagcaccaccgccagattttccagcatcgaaaacgccactgcgccgggcagcgtttctggtttgccggcgattgccagatcggcctcgccggtgactactttttccatcgcatcggcggcgtcgccggtggtgagcttaatttccaccgagggatgctcggcgcgaaaacggtcgaggattggcggcaggtggctgtatgccgcggtcactgaacagaagatatggagttcgccggaaagggacggcccctgctgatcgagggtatggcgcagctgctggtactgcaaaagcgtctgttgggcaaacactcgcagctcttcacccgcttcggtcagcgtgaccgtacggttatcgcgcacaaacagcggctggccgagatcttcttccagccgctgaatctgccgggagagcgtggaggggctgacgtgcatcgcccgcgcgctgcggccaaagtggcggctttccgccagatgcaagaaggtttttagatcgcgtaaatccacagacagacctccggtttttgacgttgcataaaccgcaacataacgttgtgaatatatcaatttccgcaataaatttcctgttgtaatgtgggttcattcgcacagatagcaatctgtaaaccgaacaataagcgcgacacacaacatcacggagtacaccatcatggctaactactttaatacactgaatctgcgccagcagctggcgcagttgggtaaatgccgctttatgggccgcgacgaattcgccgacggcgcgagctaccttcagggtaaaaaagtggtcatcgtcggctgtggcgctcagggtctgaaccagggcctgaacatgcgtgactccggtctggatatttcctacgccctgcgtaaagaagccattgctgagaagcgtgcttcctggcgtaaagcgaccgagaacggcttcaaagtaggcacctacgaagagctgatcccgcaggctgacctggtagttaacctgacgccggacaaacagcactccgacgtggtgcgttccgtacagccgctgatgaaagacggcgcggcgctgggctactcccacggcttcaacatcgtggaagtgggcgagcagatccgtaaagacatcaccgtggtgatggtggcgccgaagtgtccgggcaccgaagtacgtgaagaatacaagcgtggcttcggtgtgccgacgctgatcgccgttcacccggaaaacgatccgcaaggcgaaggcatggcgattgctaaagcctgggcggcggcgaccggcggtcaccgtgcgggcgtactggagtcttctttcgtggcggaagtgaaatccgacctgatgggcgagcagaccatcctgtgcggtatgctgcaggccggttctctgctgtgtttcgacaagctggtggcagaaggcaccgacccggcttatgcggaaaaactgattcagttcggctgggaaaccatcaccgaagcgctgaagcagggcggcatcaccctgatgatggaccgtctgtctaacccggcgaaactgcgtgcttacgcgctgtccgaacagctgaaagagatcatggcgccgctgttccagaaacacatggatgacatcatctccggcgaattctcttccggcatgatggctgactgggctaacgacgataagaaactgctgacctggcgtgaagagaccggcaaaaccgcgttcgaaaccgcgccgcagtatgaaggcaaaatcggcgagcaggagtactttgataaaggcgtgctgatgatcgcgatggtgaaagcgggcgttgagttggcgttcgaaactatggtggattccggcatcatcgaagaatccgcttactacgaatcactgcacgagctgccgctgatcgccaacaccatcgcccgtaagcgtctgtacgaaatgaacgtggttatctctgataccgcagaatacggtaactacctgttctcttacgcttgcgtaccgctgctgaaaccgtttatggcggaattgcaaccgggcgatctgggtagtgctatcccggaaggcgcggtagacaacgcacagcttcgcgacgtgaacgacgcgattcgtagtcatgcgattgagcaggtaggtaagaaactgcgcggctatatgacggatatgaagcgtattgcggtagcgggttgatataccttgtcggggggcgctagcgcttacctgacctacaaaatcaagcagacgatgtaggccgggtaaggcgtagccgccacccggctttttatttacgatacaataccttaatgatgtggtaaccgaactgggtatgcagcgggccggttggctccagtaccgggcaggaaaagactactttatcgaatgccggaaccatctggccctgacgaaattcgcctaaatgaccgccttttttaccggatgggcagatagaatgcttcttcgccagcttctcaaaatcgccgccgtttttaatttgctccagaagatctaaagccagtttctcttcttttacaagaatatgcagtgctgctgccatttttgccattattgtgttctcacgtcgcaaagattggccgtcactttatcactccttaggccgtcagacatatactcttcgccattacaggacagatgtcccgcctgatttaatgaaccgggagataagcagcatttttagcgggcgtatttcggatgtgcgggacggcggtcctgtcctttctgacaaggggcgagataccatgaacataatgaaaaacgcagaatttccagacgactggcttttagggctacgccaggtcgtacgcgacccagtgctctatgaattactcaaatactgcccgttggaaatcatgcagtacagggcgtttatgcgatgtcgcttgagtatgttctgctgacggcgatcgcgctaatgggttctttcagttggatcaagagcgcacagcgtaatggctatatgccgcttgccgccagagcctgctgattgaccttttccaggctgcctgaaaaagcagcctggtcttctctgggcctcgctttctgctacaatccctcccccgttcgaagattgagcactattcccatgcgtttaaatcccggccaacaacacgctgtcgaattcgtcaccggaccctgcctggtgctggcaggagcgggttctggtaaaactcgcgtaattaccaataaaatcgcccacctgatccgcggatgcggctatcaggcccggcatattgcggcggtgacgtttaccaacaaggcagcgcgtgagatgaaagaacgggttgggcagacgctcggccgtaaggaagcgcgcggtttgatgatctccacctttcatacgctagggctggatattattaagcgcgagtacgctgcgctggggatgaaatcgaacttttcattgtttgacgataccgaccaggtcgccttgctcaaagagctgaccgaaggcctgatcgaagacgacaaggttctgttgcaacagctgatctccacgatctccaactggaaaaacgatctcaaaacgcctgcgcaggcggcggccggggcgaaaggcgaacgcgatcgtatttttgcccactgctacgggctttacgacgcccatatgaaggcatgtaacgttctcgattttgatgatttgattttgctgccgacgctgctgctgcaacgcaatgacgaggtgcgcgagcgctggcagaataaaattcgttatctgctggtggatgaatatcaggatactaacaccagccagtatgagttggttaagctgctggtcgggcaacgcgcgcgctttacggtcgtaggcgatgacgatcagtctatctactcctggcgcggggcgcgtccgcaaaacctggtgttactgagccaggattttccggcgctgcaggtgattaagctggagcaaaactatcgttcttcgggccgcatcctgaaagcggcgaatattctcatcgccaacaatccgcacgtctttgaaaagcgcctcttttccgagctcggttacggcgcggaactcaaagtgttaagcgcaaacaatgaagagcatgaagctgagcgcgttaccggcgaactgattgcccatcactttgtgaacaagacccagtacaaggattacgccattctgtatcgcgggaatcatcagtcgcgggtatttgaaaaattcctcatgcagaaccgcattccgtacaaaatttccggcggcacctcatttttctcccgtccggagattaaagacctgctggcctacctgcgggtgttgaccaacccggatgatgacagcgctttcctgcgcatcgtgaatacgccaaaacgcgaaatcggtccggccacgctgcaaaagctgggtgaatgggcaatgacgcgtaataaaagcctgtttaccgccagctttgatatgggacttagccaaaagctgaccggacgtggttacgattcattgacgcgttttacccactggctgggggaaatccagcgtctggccgaacgcgagcctgtcgccgccgtgcgcgatctcatccacggtattgactatgaatcctggttgtacgaaacctcgccgagccccaaagcggcggaaatgcgtatgaaaaacgttaaccagctctttagctggatgactgagatgctggaaggcaacgaactcgatgagccgatgacgctgacccaggtggttacacgctttacactgcgcgatatgatggagcgtggcgagagcgaagaagagctggatcaggtacagttgatgacgcttcatgcatcgaaaggactggaattcccgtatgtctatatggtgggaatggaagaaggatttttgccgcatcaaagcagcattgacgaagataatattgaggaagagcgtcggctggcctatgttgggatcactcgcgcgcagaaagagctcacctttacattatgtaaagagcgccgtcagtatggggaactggtgcgcccggaacccagccgcttcctgttagaactcccgcaggatgatttaatctgggagcaggagcgcaaagtggtaagcgctgaggagcgaatgcaaaaagggcaaagtcacctggctaatctgaaagccatgatggcggcaaagcgagcgaaatcgtaggccggataagcgaagcgtcatccggcaatcaaactacggttagcgaacgtccagcggccagtgtacatagctttgccactggctttcctgatcaatcaactctttacccagcgggtgatgcgccagccagtcgccaggcaaggttaacgtcagattttcatttagcgcctgtagcgtaatttctggtaccagatcgtcacgacggcgaccagcaaaaagaatcgccaggcgcagcaaacggcatagctgttccgcaacacggggcggtaccgcgttttgctgatgaagcgaagagagatcgaccggattggtctgattcagtaagagggtggcgagcaattttttctgcgcgggcgtatagccaggcagatccaaatggcgtactaaataggcggcatgatagggcgcctgtttaaaatcaacgctcagaccgatctcatgcaactggcaagcgctaagcaacagttcacgactgataggctcaatatgccaggcattttctacctgtttgaggaagttatctgccagcttcgctacgcgatttgcctgatcggtatcgacgataaaccgacgctgaatgtttcgcagcgtgcggctgcggatatcctgatctaccgccagatgcaacatcccatacaccagcccttcgcgtaacgcgccgcctgccagcgtcatgctctggatgttcagctcggtaaatattgcgatcagaatagccagcccgcttgggaaaaccagcgcgcgctccagcgtcaggccttcgatttccagctcttccagacgcccgcactgtatcgcgcgttgttttagctgctgcagtttggcgagcgtaatgcgctcgtccatcccctgcgccatcatgatttcctgcaatgcctgtacggtgccggaggcacccacgcagaccttccagccatgaaaacgcagttcatcggcgaccggacgcagtacatcgcgcgcggctttctccgcgtcatcaaaattttcttgcgccagattacgatcgctaaaatagcgttcaagccacgttacgcagcccatcgacaggctaaacagcgacgtggtttgcgcgccagtgccggtaaccagttcagtgctggcgccgccgatatccaccaccagtcgctgatctgcgccgccggtggtatgagcgactccctgataaatcagccgcgcctcttcttcgccgctgataacctgcaccggacaaccaaggatagtctgcgctttcgcgataaattcccccgcattaacggcgagacgcaatgttgcggtggcaaccacgcggatttgcggctgcgggatatcctgcaaacgttcagcaaacagacgcaggcattgccagccgcgttccatcgcttcggccgaaaggtggttgtcgttgttcagacccgcggccagacgcaccttgcgttttattcgggtcagcgtctggatgcttcccgccgcctcgcgcacgaccagcatatgaaaactattggaaccgagatcaatggcggcatacaacgaggtggaattcatacacttcatccttcaacctgtatccgtgttggctgcgtactcttcctaagctcatcgggatttgttttcttgccgccttgatacaggctaaatgattttgtgtatggcataacttttcttaacctgaacgacgacgattacgcggagcgccagcgcggcgcggaccattgccaggacgcgaacgcgtcagacgcaacggcttgggcagatcgttcatgagcgcttccggattgtatttgctgaccggaatcgagtggccgatatagctctcaatggcgggcagattcagcgcatactcttcgcaagccaggctgatggaatgtccgctggcgccagcgcgaccggtacgaccgatacggtgaacatagtcttcacaatcgtctggcagatcgtagttaaagacgtgcgttacggcggggatatgcaacccgcgcgccgcgacatcggtcgccacaagaatatccagatcgccgcgggtgaactcatccagaatccgcaggcgctttttctgcgcgacgtcgccggtcagcagaccaacacgatggccatctgccgccagatgtccccagatatcttcgcaacgatgcttggtgttggcgaaaataatggcgcgatccggccactcttcttcgatcagcgtttgcagtaaacgcattttctcttcattagaggggtagaaaagctcttctttaatgcggtggccggtcttttgctccggttccacttcaacatattcggcgttgttcatctgttcaaacgccagctcgcgaacccgataagacagggtggcggagaacaacatgttcagacgctgcgcagccggcggcatacgacggaacagccagcggatatctttaataaagcccaaatcgtacatgcgatcggcttcatcgagtacgacgacctgaatggcgccgaggttaatgtgattttgtttggcgtagtcgatcagtcggcccgtcgtaccaataagaatatcaacgccgctttccagcactttaagctgcttgtcgtaaccatcgccgccgtaagccaggcctaattttaagcctgtcgcttgcgccaacggctccgcgtctgcgtgaatttgtacggctaattcacgcgtcggcgccatgatcagcgcgcgcggctggttcaccttgcgatcgtcgatcgcgggatgagaaagtaaataatgaaacgttgacgtcagaaacgccatcgttttcccggtaccggtttgcgcctgccctgcaacgtcacgacccgccagcgttagcggaagggccagtgcctgaatgggcgtacaattataaaacccttttttttcaagggcttcaaccacctgtgggtgcagggcgaagtcggaaaacttctgttctgttaaatgtgttttgctcatagtgtggtagaatatcagcttactattgctttacgaaagcgtatccggtgaaataaagtcaacctttgttggcgaagttaacatcagcacctcgttggttaatgctacaccaacacgccaggcttattcctgtggagttatatatgagcgataaaattattcacctgactgacgacagttttgacacggatgtactcaaagcggacggggctatcctcgttgatttctgggcagagtggtgcgggccgtgtaaaatgatcgctccgattctggatgaaatcgctgacgaatatcagggcaaattgaccgttgccaaactgaacattgaccagaacccaggtactgcgcctaaatatggcatccgcggtattccgactctgctgctgtttaaaaacggcgaagtggcggcaaccaaagtaggcgcactgtctaaaggtcagttgaaagagtttctcgacgccaatctggcgtaataccttttatacgtcgaatgacaaaggcgctgtatggtcaggcgtctgtcattcgacgaatgattaaggtatcaggcagtttcgtggcgtctgttgtccttacgttattcttaaattgtcaggatctctggacgcccggtctgagtcgtgctaagttagtattgacttcgaattaaacataccttattaagtttgaatctggttttatccgtcacttcccgttttttctcgcacgagaagtggaaagattcctggctcttcgctcattccgtcttgtcgtttcagttctgcgtactttcctgtgaccagacagcgaacagacatgagttgatagccgtaaacaggcatggatgaccctgccataccattcacaacattaagttcgagatttaccccaagtttaagaactcacaccattatgaatcttaccgaattaaagaatacgccggtttctgagctgatcactctcggcgaaagtatggggctggaaaacctggcccgtatgcgcaagcaggacattatttttgccatcctgaagcagcacgcaaagagtggcgaagatatctttggcgacggtgtgctggagatattgcaggatggatttggtttcctccgttctgcagacagctcctacctcgccggtcctgatgatatctacgtttcccccagccaaatccgccgtttcaacctccgcactggtgataccatttctggtaagattcgcccgccgaaagaaggtgaacgctattttgcgctgttgaaagttaacgaagttaactacgacaaaccggaaaacgcccgtaacaaaatcctctttgagaacttaaccccgctgcacgcaaactctcgtctgcgtatggagcgtggtaacggttctaccgaagacttaacggcgcgcgttctggatctggcttcgccgatcggtcgcggccagcgcggtctgattgtcgcgccgccgaaagcgggtaaaaccatgctgctgcagaacatcgcgcagagcatcgcgtataaccacccggactgcgtgctgatggtgctgctgattgacgaacgtccggaagaagtgaccgagatgcagcgtctggtgaaaggcgaagtggttgcttctacctttgacgaaccggcatcccgccacgttcaggttgccgaaatggttatcgagaaggcgaagcgtctggttgaacacaagaaagacgttatcatcctgctcgactccatcacccgtctggcgcgcgcctacaacaccgtggtgccggcttccggtaaagtattgaccggtggtgtggacgctaacgccctgcatcgtccgaagcgtttcttcggcgcggcgcgtaacgtggaagagggcggtagcctgactatcatcgcgacggcgctaatcgataccggttccaagatggacgaagttatctacgaagagtttaaaggcaccggtaacatggagctgcatctctcgcgtaagatcgctgaaaaacgtgtcttcccggctatcgactacaaccgttccggtacccgtaaagaagagctgctcaccactcaggaagagctgcagaaaatgtggatcctgcgtaaaatcatccatccgatgggtgaaattgacgcgatggaattcctcattaacaaactggcgatgaccaaaactaatgacgactttttcgagatgatgaagcgctcataacctggtctttacctgaaaacgccacgtttttacgtggcgtttttgttttgcgattcatcctggcgtcatgtcatataaactggtcatcgggatatgcgctacagagtaacaccatgcacaatacacattgtttgcggtaaaaagtgtaatgttctaacaggtctcttctaggagctggcgtaacgcattatactttaaggaaatgatatatgctgagagcacatacactgtgaagttactcaccgctttatctgagctaatcagtatttttttattcacgaccatttttatttttcttgcgcgaaaagtagccataaaaattggtttagtggataaaccaaactttcgtaaacgacatcagggcgttatcccattagtcggcgggatttctgtgtttgcaggaatctgctttatgtttggcctctcggattactacataccgcacttatcgctatatcttatttgcgctggtgtattggtttttgttggtgcgatggatgaccgttttgatatcagtgtaaaaattcgtgctgtggttcaggctgttattgcggttgtaatgatggttatcgcaaaacttcacttaggtagccttggttacatctttgggccttgggagttagtgcttggcccctttggctatttccttactctgtttgcggtatgggcggcgatcaacgctttcaatatggtggacggtattgacggcctgctgggtgggttatccagcgtctcatttgcggcgatggggctgattttatggtttgatggtcagactagtctggcaatgtggtgctttgccatgatcgccgcgattctgccttacattatgcttaatctcggtattttggggcggcgttacaaagtctttatgggcgatgccggtagtacactgattggctttaccgtcatctggctcttactggaaacgacgcaggggaaaactcactctatcagcccggttaccgcgctatggattatcgctattccattgatggatatggtggcgattatgtatcgccgtctgcgtaaagggatgagccccttttcccctgatcgccaacatattcatcatttggttatgcgagcagggtttacttcccgccaggcatttgttcttattacgctcgcagcggcgattctggcgggagtaggcgtaacggcagaatactctcattttgttcctgaatgggttatgttggtgctctttttgctagcattcttcctctatggctactgcattaagcgggcctggaaggtggcgagatttattaagcgtgtgaagcgtcgcctgcgcaggcaacgtgagaaccggccaaacttaaccaagtaaatgaggatacgatgacacaaccattaccgggggcacgcgcggtgagcgctgaaaatgaactggatattcgcgggttgtttcgtactttatgggctggcaaattctggattatcggcattggcctgctatttgcccttatcgcgttagcctataccttttttgctcgtcaggagtggagtgcgacggcgatcaccgatcgcccaaccgtaaatatgttgggcggttattactcccagcagcagtttctgcgcaacctggatattaagaccgatcctgcttcttctgataagccctcggtgatggatgaagcgtataaagagttcatcatgcaacttgcctcctgggatacgcgtcgcgatttctggttacagacggactattacaagcagcgaatggtcgggaatagcaaagctgatgcggcgatgcttgatgaactgatcaataacatacagtttacgcccggcgattttacacgcgccatcaacgacaatgtgaagctgattgctgaaactgcgccggacgccaataatctgctgcgtcagtatgtcgcattcgccagccagcgggcggcgagccatctgaatgatgaattaaaaggtgcctgggctgcgcgtaccgtgcagatgaaagcccaggtcaaacggcaggaggaggttgcgaaagcgatctattcgcgtcgtgtaaacagtattgagcaggcgctcaaaattgcggaacaacataatatttctcgtagcgcgacggatgtcccggcggatgaattaccggactcagagctttttttactcggtcgccctatgttgcaggcgcgtcttgaaaatctgcaagcggttggccctgcgttcgatttggactactttcaaaatcgggcaatgttgaatacgcttaatgtggggccgaccctggaccctcgttttcagacctatcgttatttgcgtacgccggaagaaccggtaaaacgtgatagcccacgccgagccttcctgatgatcatgtggggtatcgttggggcgctaatcggtgcgggcgttgccttaacccgtcgccgcacgatttagcaacacctctgcagtagggggctgggcccctactgtctattcgaagagaatcgatgtgaaagtactgactgtatttggtacacgaccggaggccattaagatggcgcctctggtccatgcgctggaaaaagatcctcatttcgaggccaaagtatgcgttactgcgcagcatcgggagatgcttgatcaggtattaactcttttttctattgtgcctgattacgatctcaacattatgcagccgggacaggggttgacggaaattacctgccgaattctggagggattaaagccgatcctggcagattttaaacctgatgtggtgctggttcatggcgataccaccactacgattgctaccagcctggcggctttctatcaacgaattccggtagggcacgtagaagccgggttgcgaaccggcgatctctattccccctggccggaagaggcaaaccgcacgctgaccggacatctggcgatgtaccactttgcgccgacggaaaactcgcggcagaatctgttgcgggagaacattccggatgagcgcatttttgtcactggcaataccgttatcgacgcgctgatctgggtacgcgatcgcgttctgacgagcgatacattacaggctgaactggccgagcagtatcctttcctcaacgcgaataagaagatgattttagtgaccggtcatcggcgtgaaagctttggtcagggctttgagcatatctgccaggcgctggcggaaatcgccgccgcgaaccagaatgtgcaaattgtctatccggtgcatctcaatcccaacgtcagcgaacctgtcaaccgtatcctcggccatgttgaaaacgtggtactgattgagccgcaggactacttaccttttgtctggctgatgaatcacgcctggctcattctgaccgattccggcggtattcaggaagaagcgccgtcattaggtaagccggtattggtcatgcgtgaaaccacagagcgtccggaagccattaccgctggtacggtaagactgatcggcacggactcccggcgcattgtggcggaagttatgcgtctgctgcacgacgaaaatgaatatcaaaccatgagccgcgcccataatccttatggtgacgggcaatcatgcgcgcgcattttacaggcgttaaaaagttatcgggtatcgttatgagttttacgaccatttctgttattgggctggggtatatcggattaccgactgcggccgcttttgcttcccgccagaagcaggttatcggcgtggatatcaaccaacatgcggtagacattataaatcgcggtgaaattcacatcgtggagccggcgttgggcaatgtggtgaagatggcggtggagggcggctttctgcgtgcgacgacgacacctgtcgaggccgatgcgtacctgattgccgtgccgacaccattcaaaggcgatcacgaccctgacatggcctatgtcgaagccgcggcgaaatccattgcgccagtattaaaaaaaggggcactggtgattctggaatcaacatcgccggtcggcgcaacggagcaaatggctggctggctggccgggatgcgcacggatctgacctttccccagcaggcgggcgagcaggccgatgtgaatatcgcctattgtccggagcgtgtgctgccgggtcaggtgatggtggaactcattaaaaatgaccgcgtgattggcggtatgacgccagtatgttcggctcgcgccagcgcgctgtacaaaattttccttgagggcgaatgcgttgtcaccaactcgcgcaccgcggagatgtgcaaactgacggaaaatagcttccgtgatgtgaatatcgcctttgcgaatgaattgtcgctgatttgcgccgaacaggggattaacgtttgggaattgatccgcctggcgaaccgccatccgcgcgtcaatattttgcagccgggcccaggcgttggcgggcactgcattgcggtcgatccgtggtttattgtggcgcaaaatccgcagcaggcgagactgattcgcaccgcgcgtgaagtgaacgacggcaaaccgcactgggtggtcgatcaggtaaaagccgcggtcacagattgcctggcggccaccgataaacgcgccagcgaagtgaaaatcgcctgttttgggctggcctttaagccgaatatcgacgatctgcgcgaaagcccggcgatggggatcgcgcaaagtatcgcccgctggcacagcggcgaaaccctggtcgtcgaaccgaatatccgtcagttgccgaaaaaattggacggactttgtacgctggcgaaactggacgcggcgctggccgccgccgatgtgctggtgatgctggtcgatcacgacgaatttaaagcgattcccggcgatgcggttcatcaacgttatgtggttgataccaaaggagtctggcgctgatgaaacgcattctggtgaccggcggcgcaggctttatcggatctgcggtggtgcggcatatcatccatgaaacggcagacgcggtggtggtggtggataaactcacctatgcgggcaacctgatgtctctggcgtcggtggcgcaaagcgaccgtttcgcctttgagaaggtggatatctgcgatcgggcatcactggagcgagttttccagcagtatcagcccgatagcgtgatgcacctggcggcggaaagccatgtagaccgttccatcgacggcccggcggcgtttattgaaacgaatatcgttggtacttacaccttgctggaagccgctcgcgcttactggtccgcgcttgacgcggacgctaaagcggcgttccgcttccaccatatctccaccgatgaagtgtatggcgatctgcatactgcagacgatttcttcaccgaaaccacgccatatgcgccaagcagcccttattccgcctccaaagccagcagcgaccatctggtacgcgcctggttacgtacctacggtctgcctacgcttgtcaccaactgctctaataactacgggccctaccatttcccggaaaaactgatcccgctgatgattctgaacgcgctggcgggtaaaccattgccggtctatggcaacggtcagcaaattcgcgactggctgtatgtggaggatcatgcccgtgcgttgtatcacgtggtgacgaacggcgcggtgggtgaaacgtataatatcggcggtcataacgaacgtaaaaatctggatgtggtcaggacgatctgcgctctactggaggaactggccccgcaaaaaccgcagggtgtggtgaattatcacgatctgattaccttcgtcgacgatcgccccggccatgacttacgttatgccatcgacgcgtcgaaaatcgcccgcgagctgggctggacgccgcaggaaaccttcgaaagcgggatgcgaaaaaccgttcagtggtatctcgccaatgaggcctggtggaaacccgtgcaggatggcagttatcagggcgaacgcttaggactgaaacgctaaacggcaggttcttactcctggaggagaaacgaatgaaaggcatcattctggcgggaggttccggtacccggttgcatcccattacgcgcggcgtatcaaagcgccagggcttcaaaattgcctgtctggaggagattgcctggcgcaacggctggctggatgatgatggtttgaaacgcgccgccagtcagcttgaaaaaaccggctatggccaatatttactggagttgctccgtgcccgtccgcgccagtattgaaccgttactctgggaaaatacgttctttggcgtgaatagcggcattgtgcgtatcgatgcctcagcgcccgaattaacgccagaagcactgcaggcgtggcaacgcgtgcaggtaaaagtgccggctgaaaacatcgcctggctgtcggcgttgcaatcgctgggattctctttggttgaaggcgaggtggattttgcgttgccggtaaaagggcatcgcgaccagcatggcgcggaaattgcacaccttacggacattcctgctttgcgtcagttggccggagaggcgtttacgcagagtcgttttcgcgcgccgtggtatgcgcccgacgccagcgcccgtttttacgcccagtggattgagaatgcggtacgcggcacgtttgatcaccaatgcctggtgcttcgcacggagacaggcgctatccgcggttacgtctcgctgcgggaattgaatgataccgacgcgcgcattggcctgttggccggacgcggcgcgggagcggaacttatgcaggcggcgatctgttgggcgcagagtcgcggcaaagcaacattgcgggtggcgacccagttgggcaacaccgccgcgcttaaacgttacatacaaagcggtgccaacatcgaaagcactgcgtactggttatacaggtgacaacatgattccttttaatgcgccgccggtggtgggaaccgaactcgaatacatgcagtctgcaatgagcagcggcaaactgtgcggcgacggcggctttacgcgtcgttgccagcagtggctggagcaacatttcggcagcgcgaaggtgttgctaacgccttcctgtaccgcatcgctggagatggcggctctgttgttggatattcagcccggcgatgaagtgatcatgccgagctttacgtttgtctccaccgctaacgcttttgtcctgcgcggcgcgaaaattgtgtttgtcgatattcgtccggatacgatgaatattgacgaaacgctgattgaggcggcgattactgataaaacccgcgctatcgtgccggtacactacgctggcgtcgcttgtgaaatggacgtcatcatggcgctggcggataagtataatctgttcgttgtcgaggatgccgcccagggtgtgatgtccacgtacaaagggcgcgcattagggacgatcggtcacatcggctgttttagcttccatgaaaccaaaaattacaccgctggcggcgaaggcggcgcgacgctgatcaacgatcgtacgctaattgaacgcgcggagatcatccgcgaaaaaggcaccaaccgtagccagttcttccgtggtcaggtggataaatacacctggcgggatatcggctccagttatttgatgtccgatctgcaggctgcctatctgtgggcgcaactggaggccgccgatcgtatcaatcaacagcgtctgtcgctgtggcagacttactacgatgcgttaacgccgctggcgcgcgccgggcgtttcgagctgccttctattccggaaaactgcgggcataatgcccatatgttttacatcaaactgcgggatatcgccgatcgcagcgcgctgattaatttcctgaaagaggcggaaatcatggcggtattccattacattccgctgcatgattgtccggcgggcgataaattcggcgagtttatcggggacgatgtctacaccacaaaagagagcgaacgtttgttgcgtctgccgctgttttataaccttgcgcccgtcgatcaacgaacggtgattactaccttgctaaattatttctcctgatatgtcgcttgctaaagcctccctgtggacggcggtcagtacgctggtaaaaattggcgccggactgctggtggtgaaactactggccgtctcttttggtccggcgggcgtcggacaagcgggtaacttccgccagatgattaccgtgctgggcgtattggctggcgccgggatatttaacggcgttaccaaacttgtcgcacaacatcatgataacccggcgcagttacgtaccgtggtgggaacctcctccgcgatggtattggggttctctacgctgctggcgctggtcttcttgctggcggcggcgccgattagccagggattgttcggtcatacggactatcaagggctggtgcgtctggttgcgctggtacaaatggggatcgcctgggcgaacctgctgctggcgctaatgaagggctttcgtgacgcgtcgggtaatgccttatcgttaattgtcggcagctttttgggcgtcgccgcctggtatctctgctaccgtgtcggcggctatgaaggcgctctgcttggcctggcgctggtgccggcgctggtggtagtgccagccggtataatactgattaagcgcggcaccgtcccgctacgctatctcaagccctcctgggacaacggtctggcagggcagctcagtaaatttaccctgatggcgctgattacctccgttacgatgccggttgcctatgtgatgatgcgaaaccaactggccgcgcactatagctggagcgatgtcgggatctggcagggcgtaagcagtatttctgacgcctatctgcaatttatcaccgcctccttcagcgtttacctgttacccacgctctcacgcctgacggaaaaacaggacattacgcgtgaagtggtaaaagcgctgaaatttgttttaccggcggttgcggcggcgagttttaccgtctggctactgcgcgattttgctatctggctgcttttttccgctaaattcaccgcgatgcgcgatctgttcgcctggcagttagtgggcgacgtgctgaaagtcggcgcctatgttttcggttatctggtgattgccaaagcgtcgttgcgattttacattctggctgaaattagccagttcattctgttaacggcgttcgctcactggctgattcccgctcacggcgcgctgggtgcggcacaggcttatatggccacctatattgtctatttttcactttgttgcggcgtatttttactctggcgtaggcgagcatgactgtactgattcacgtcctgggatcggatatccctcaccataaccacaccgtgctgcggtttttcaatgatacgctggccgccacaagcgagcacgcgcgcgaatttatggttgccggcgaagataacggcttcacggaaagctgcccggcgctctcgcttcgtttttatggcagtaagaaagcgctggcgcaggcggtcatcgccaaagcgaaagcaaatcgtcgacagagattcttctttcacggtcagttcaacaccagcctgtggctggcgctgttaagcggcggtattaagccagcccagttttactggcatatctggggcgcggatctctacgaagtgtcccacgggctgaaattccgccttttctacccgcttcgtcgtatcgcgcaggggcgagtagggggcgtattcgcgacgcgcggcgatctcagctattttgcgcgtcagcatccggacgtacgcggcgagttgctctatttcccgacgcgcatggacccttccctgaatgctatggcaaaagagcgccaacgtgcggggaaattgaccattttggtagggaactccggcgatcgcagtaaccaacacattgcggcgttacgggcggtgtatcagcagtttggcgacacggtaaacgtggtggtgccgatgggctatccggccaataaccaggactatattgatgaggttcgtcaggccggtctggcgctatttagcgccgaaaatttacaaattcttagcgaaaaaatggaatttgatgcctatcttgcgctgttgcgccagtgcgacctcggttattttatttttgcccgccaacaggggatcgggacgttgtgtctgctaattcaggccgatatcccgtgcgtactgaatcgcgacaatcctttctggcaggatatggcggaacagcatctgcccgtcctgtttaccacggacgatcttaatgagcaggtcgtgcgcgaggcgcagcgtcagctcgcatcggtagataaaagcggcatcaccttctttagccccaactacctgcaaccgtggcataatgcgttgagaatcgccgcaggagaagccgaatgagtttaatgcaattcagcgggctgctggtggtctggctgctctctacgctgtttatcgccacgctgacctggtttgaattccgccgcgtgcgttttaacttcaacgttttcttttcgttgctgtttttgttgaccttcttttttggttttccgctaaccagcgtgctggtatttcgtttcgacgttggcgtcgcgccgccggaaatcttattgcaggctctattatccgccgcctgtttctacggcgtgtattacgtgacctataaaacgcgtttacgcaaacgcgttgtggatgtaccacgcaagccgctatttaccatgaaccgggtggaaacccaccttacctgggtgatcctgatgggcatcgcgctggtgagcgtggcgattttctttatgcataacggctttttgctgttccggctgcactcctacagccagatcttttccagcgaagtctccggcgtggcgttaaaacggttcttctatttcttcattccggcgatgctggtggtctatttcctgcgccaggacagcaaagcgtggctgttctttctggtgagcaccgtcgcgtttggtctgttgacctacatgattgtcggcggcacgcgcgctaacatcattattgcgtttgctatcttcctgtttatcggcattattcggggctggatcagcctgtggatgctggcggcggcgggcgtgctggggattgtcggtatgttctggctggcgctcaaacgctacggattaaatgtgagcggcgatgaggcgttctatacgtttctttatctaacgcgcgataccttttcgccgtgggagaatctggcgctgctgttgcaaaattaccacaatatcgagtttcaggggctggcccctatcgtgcgtgatttctacgtctttattcccacctggttatggccgggacgacccagtattgtgctgaactctgcgaattacttcacttgggaagtcctgaacaaccattctggcctggcgatatcgccaacgcttatcggatcgctggtggtcatgggcggggcgctgtttattccgctcggcgcgatcgtcgtcgggctgattatcaaatggttcgactggctgtatgaactgggtaaccgggagcccaatcgctataaggcggcgattctgcacagtttctgctttggcgccatctttaatatgattgtgctggcgcgagaagggctggattcgtttgtttcgcgcgtggttttcttcctggtggtttttggcgccagcctgctggtcgctaagcttctgttctggttatttgatagcgccgggctgattcataaacgtacaacttcgctccctcaggcacaggtggaaggaaaactatgaccaataatgccgctgcgcccctttactcgctgcgtggattacctctgattggctggcgcgacatgtcacacgcgctgaattatctgtttgccgatggtcaactgaagcaaggcacgttggtggcgatcaacgccgaaaagctgctgacggcggaagataatccggaagtccgcgcgttgatagcggcggcggaatttaaatatgccgatggcatcagcgtggtgcgttcaatacgtaaaaaatttccgcaggcgcaggtttctcgtgtggctggcgccgacctttgggaagcgttaatggcgcgcgcgggaaaagaaggcacaccggtatttcttgtcggcggcaagcctgaggtgctggcgcagacggaagcaaaactgcggacgcagtggaacgtcaatattgtgggtagccaggacggttactttacgccggagcagcgtcaggcgctatttgcgcgtatccatgccagcggcgcgaaaattgtcaccgtcgcgatgggatcgccaaaacaggaattgctaatgcgcgattgtcgggaagtgcatccccatgcgttatatatgggggtgggcgggacctatgatgtgtttactggtcacgtcaaacgcgctccaaaaatatggcagaacctgggactggagtggttgtatcgtctgctttctcaaccgaggcgtattacccgccagatgcgcctgctgcgctatcttcgctggcactatactggcgatctctaattctcccttctgatgacttgagcagcggattgtgcttatggtgctgctcatttacaacataatcgatgatttcttacacaataagtgcatttttttaatgctccatttgccatttgtccaaatttaagaaaatattcgcaacaatcgatgtacccataacaataaccggtactaccggaaccgttgcaaacacgacatgaggatttatggcagagaaaaaaccggagctacagcgtgggctggaagctcgtcatattgaattgattgccctcgggggcaccatcggcgtcggactctttatgggcgccgccagtacgctgaaatgggcgggcccgtcagtgctgctggcgtatatcatcgccggattgttcgtctttttcatcatgcgttcgatgggggagatgctctttctggaacctgttaccggctcctttgccgtgtacgcccaccggtatatgagtcctttttttggctatcttaccgcctggtcatactggtttatgtggatggcggtcgggatctcggaaattaccgccattggggtctacgtccagttctggtttccggagatggcgcagtggataccggcgctgattgccgtcggactggtcgcgttggcgaatctggctgcggtgcgcctgtatggtgaaatcgagttctggtttgcgatgatcaaagtcaccacgattattgtgatgatcatcatcggtctgggggtgattttcttcggctttggtaacggcggccaggcgattggctttggtaatctgaccgagcatggcggcttttttgccggcggctggaaaggctttctgaccgcattgtgtatcgtggtggcctcttatcagggggttgagttgatcggtattaccgccggtgaagcgaagaatccgcaggtgacgttgcgtagcgcggtgggtaaagtgctgtggcgtatcctgattttttatgttggcgcgattttcgtgatcgtcaccattttcccgtggaatgagattggcagcaacggcagcccctttgtgctcaccttcgcgaaaatcggcatcaccgccgcggcaggcattatcaactttgtcgtgctgacggcggcgctctccggctgtaacagcggaatgtatagctgtgggcgtatgctttacgcgctggcgaaaaaccgtcaactgccggcggcagtcgcgaaagtctctcgccacggcgtgccggtcgcgggcgtggcgctctctattttgattttgctggtaggttcttgcctgaactacatcatccccaatccgcagcgcgtctttgtttacgtttatagcgccagcgtactgccggggatggtgccgtggtttgtcattctgattagccaactgcgctttcgtcgggcgcataaagaagcgattgcggatcatccttttcgttccattatgtttccgtgggcgaactatttgacgatggcgtttctggtttgcgttttaatcggcatgtactttaatgaagatacgcgcatgtcgctgtttgtcggcgtcatcttcctgctggccgtcacgctggtctacaaagttttcggtctgaatcgtcacggaaccgcccacaaggtgggggaataagcgccaaaatgcgcaaagcataaccaaacgcgcattttatttaaaaaggcactggacagcggggtgtgaagtccgtattatccacccccgcaacggcgctaagcgcccgtagctcagctggatagagcgctgccctccggaggcagaggtctcaggttcgaatcctgtcgggcgtaccatttatttaggtgcttgagctgcggtggtttaataccgcgtaaaaagtttcagtggtggctatagctcagttggtagagccctggattgtgattccagttgtcgtgggttcgaatcccattagccaccccattaatatagagttgtgaaacgcgaaggtggcggaattggtagacgcgctagcttcaggtgttagtgtccttacggacgtgggggttcaagtcccccccctcgcaccacgactcaatgaattgaactaaaaattcaaaaaagcagtatatcggcgagtagcgcagcttggtagcgcaactggtttgggaccagtgggtcggaggttcgaatcctctctcgccgaccaattttgaaccccgcttcggcggggttttttgttttctgttccttttcaaccccttatcccgcacgtgttgccattatgatttgttggcgatatcccaggcttcatttgtcgctattcggtgacgagtaatctattgatttataatcactttgtaaaaagcatcctgttctgtctccaccgggcgacacgctaaaacctcgccagcggcggggggatgacaatcgcgtgaattctctacgtttttttaatgcctgcgcctgttttttagcggtgcaaagatggcacgttatgtgcaataatgtacgggtagatgctcattccatctcttatgttcgccttctggcctcataaactcaggaatgatgcagagccgtttacggtgcttatcgtccactgacagatgtcgcttacgcctcatcaaacaccctggacacaacgttgagtgaagcacccctttatgttgtcatacagacctgttttgacgcctgccccttaaccgggcaggcgtttttttatgcatctcgaatgattttgtgtaggcggtaggcccggtaagcgaagcgccaccgggcaagagggaattactgcgggggattgttctgtaatgtcagcatcaggccgtcgcgccgcatggcggcggcctcttccggttgatgcagtcgatcaagcgcatcggcaagccaggcataatcatacgcgtccgggcgttgtttcagcgcggcgcggaaagccagggtcgcctcctgccattcaccgtgtttcattagcgactggccgagcgtgctccataacagcgggcgatcgcctaccgtcttgatttgctggcgcagcactttctccagttgttccggattattggttctgaggcgaggaatgggcagcaccagccgatcgtcatactggcgtttcagaccgtcgatgataatctgctgcgccatatcatgatcgtcacattcgatcagatgctcggccattgcgacctgcagcgccacctgatggcgggttttacggctttggtttttccaccaggtgcgtaatccttcgctgccctgctcggcgcgcgcctgatccatgagtcctatccacgcctgttgttcgagcatagcgcgatgcgcttcatcgccaacgtgcgctttcgccatggatgggatgatatccagtaaagaactccatgcgctggtgcgaatataggcctgctccgccagacgcagaacttccgggtgacgcggcgtgacctccagcagtttgtccacgccgtgacgcgccgcgtgattttcattgcgcgccagctgtaagcgcacgcgcgtgatctcgaccgggatggtgtcgttccccgccagctctgccgcacgttcaaggtgctgattagcgcgcgcttcatcgccgcgctgctgcgctgcttctgccgccagcagataatttaccaccggttgttcagcatgatcggcattttttgacatcagcttttcaacctgctgataatcgccctccgccagcttcagcagcgcctgttcggtctgcttgcgggcgcgacggcgtttacggccggcaaaccaaccgcgggtgtgcgcgccggtacgaaacagacggcgtagtaaccactcaatggcgaatagcaccaccatagcgacgatgagaatgatcgccaggccggtgacgctggtttcaatgttgtagttatcggtctggattaacacatagccctggtgaccggctatcatcgggccgaccacgatacccgcaagcaacaacacaaagagcaataatacttttagcatcattattctccttgcggcgcggctgccggagcgtctgtctgcgtggcaggcgctgccgtagagactgtcggttgcgccagcagattacgcacgcgggtttgcatcagtttttcaagaatcgcctggcttcccagggtttctggcagatccatcgtgatattttgctggcttaatttatcgacctcctccaggaaggcttttgtcgcggcgtcgtcagtatcgtaataagcgcgaacccaggtcgaaacgttatccagcgcctgacggtatgtttcttcctgatggcgtggcacggcctgcgcggcgactaacaggcgggagcgaatattttcgcgtaaatagacgtcctggttgggtgccaacagcggtacggcggtatcatcgcggcggcgaatggtaataaagctgtccataaagttctgccagcttttttgcaggttaacgcgccattcgcttaacgagctggacagctcgctgctgtctgaatccatcggcgaaccatcggtatcgttatccgccagacgcaggttatcgatttggttagagagctgattgagcttgagaataatgccgtcgtagtcgatctgcgcaacggatgacaggctggcgatatcgtcagtaatcgcgcgtcgtgcggtaatcaggctggggtcattcatgtccgccagactggcgtcagcgcttttgagcagcgcagcggcggtagtgacgtcctgatcgctccacagcttgcgtccggcgagtttcaccaggaaatcagcctgcgccagcagccaggttttagcatcgctgccggaaatagtggcgactttttgttgtacttcatcaagctgtttcgccagcgccgcctgttggcgattcgcgtcatctaactgcgccgcttgttttttgataatcccttccagctccgctttttggctctcctgcgccttttgcaaggcggtcagttgcgtcgccagcgcatcgctggtttccgtttgcgcggttgcttgctgtttcccccagccataaagcccaatacctgccgccagggcaatcgcaatcgccaccgcgcttaataccagcgcggcgccgttcttactttttttctcggtattaactggctgtggcgtggtttccacgctctccctggtctcatcaaccacggcggaggatttttcttgttccgtcattatggcatcccattatgagagttattgtaatgcgcgcaacagcgcatcgttgtcggcgttatcagcgaccttaatatcttgccagcccagttcccgggcgaggtgcgccagacgctcactgacgaccaatagccgacagcgtagtaaccagtgctcacgataccactggggagtcagcgaccagagccgttgcaacatctcgccgctggtaacaacaagcgttgttacgccgcgagtatgccagcgcatcgcttcttccgcgccatcgtaatgtttcgcacatcgttgataacattcacaaaaactgacttcggctccgcgcgctgtcagggtttcgcccagcagttcgcggccgccattgccacgcaaaatcagcgcgcgtttgcccgcaatattttgtaattcaggtaattgtagcaaggcttcgctgatttcccgatccaatggataacgaatatcgaacccgctaacggtatgaagggcgagcgccgtggtgcggccaatcgcgaaatagcgcggcgccacaggccagtttcgaccatcccgctggagctgggcgtgagcaaaggcgacagcgtgctgtgaaagggcaaaaaccagatcgttttccgtcagcgtcgccaggcggtcggccagggtgggtagctcccgaccggcgacaaattcaatcagtggaaaactccaggccacctgccccagtgcgcgcagacggctcactaacgcttcccctgcgggagaggggcgggtgatcagaatactcatgcgggcgtctcgccgttataaacttccgtcagaatcgcgcgtgcgccgttttccagcagttcctctgcaagcgagatgcccatttgctccgcctgctcgggagaaccacgacgttcgccgcgcaccatcaccgaaccgtccggcgcgccaaccagcgcgcgtagccaaatttcaccgttgatgatttctgcatagctgccaatcggcacctgacaaccgccttccaggcgggtgttcatagcgcgttccgccgttacgcgcagcgcggtttgcgagtgattcaacggtgcgagcagcgcctgtgttcgcgcgtcgtcaagacgacactcaatcccgacggcgccctggcctacggcaggaagcgaaacgtcgggcggcaaggctgtgcgaatgcgcgactccagacctaagcgtttcagaccggccacggccaggataatggcgtcatagtcgccgttgtccagcttgccgagacgtgtgccgacgttgccgcgcaacgaacggataatgaggtccggacggcgttccgccagttgacactgacgacgcaaactggacgtcccgacgatactacccgcgggcagatcgtccagactgtgatatttattcgagacaaacgcgtcgcgcggatcttcgcgctcgcaaatggtcaccagaccgagaccgtccgggaaggccaccggaacgtctttcatagagtgcacggcgatatcagcacgtttttccagcagcgcgatttcaagctctttaacaaacagtcccttaccgcccactttcgccaggggagtatcgagaatcacgtcgccgcgtgtgaccatcggcaccagttctaccgtcagtcccggatgggttgccatcaatgcgtctttgacataatgtgcctgccaaagcgcaaggggactttggcgtgtggcaattcttaaaacattgtctaacatgcttgttaccgtcattatcaatcattgaccatcctaacatccttatagagagtatgttagttttccggtcaccgtgagtgagaggataaggcgcagtgtcgtcaatgacagtgaataatgacgagaaaccgccagcccgtatttaagaatttacacgcagcgaacggtgctacacttgtatgtagcgcatctttctttacggtcaatgagcaaggtgttaaattgatcacgttttagaccattttttcgtcggtattagataaaaatatgcaggcgagaaagggtaacggttatttttgacatacggtttatcccgaatggcgacggtcaagtactgacctgcaccatgacgggtagcaacatcaggcgatacgtcttgtacctctatattgagactctgaaacagagactggatgccataaatcaactgcgtgtggatcgcgcgcttgctgccatgggacccgcttttcagcaggtttacagtcttctgccgacattattgcactatcaccatccactgatgccgggttaccttgatggtaacgttcccagcggtatttgcttctacacgcctgatgaaacccaacgccactatctgaacgaacttgagctgtaccgcggtatgacgccgcaggacccgccgaagggcgagctgccgattaccggcgtttacaccatgggcagcacctcctcggtcgggcagagctgctcgtccgacctggatatctgggtgtgccatcagtcctggctcgacggcgaagagcgtcagttgctgcaacgtaagtgtagcctgctggaaagctgggccgcctcgcttggcgttgaggtgagcttcttcctgatcgacgagaaccgtttccgccataacgaaagcggcagtctgggcggggaagactgtggttctacgcagcatatcctgttgcttgatgagttttatcgtaccgctgtgcgcctggccgggaagcgtatcctgtggagtatggtgccgtgcgacgaagaagagcattacgacgactatgtcatgacgctctatgcgcagggcgtattaacgccaaacgaatggctggatctggggggcttaagctcgctctccgccgaagagtactttggcgccagcctgtggcagctatacaagagcattgactcgccgtacaaagcggtgctgaaaacgctgctgctggaagcctattcatgggaatatcctaacccacgtctgctggcgaaagatattaaacaacgtctgcatgacggtgaaatcgtatcgtttggactcgatccctactgcatgatgctggaacgggtcactgaatacctgacggcgattgaagatccgacgcggctggatttagtccgccgctgcttttacctgaaagtgtgcgagaaattaagtcgcgagcgtgcctgcgtaggctggcgtcgggaagtattaagccagttagtcagcgagtggggatgggacgacgcgcgtctgaccatgctcgataatcgcgcaaactggaaaatcgatcaggtgcgcgaagcccacaacgaattgctcgacgccatgatgcaaagctatcgtaatctgattcgctttgcgcggcgcaacaacctcagcgtgagtgccagcccgcaggatatcggcgtactgacgcgtaagctgtacgcggcttttgaagcgttgccgggtaaagtcacgctggtgaacccgcagatatcgccggatctgtccgagccgaatttaacctttatccatgtgccgccgggacgcgccaaccgttcaggctggtatctctacaaccgcgcgccgaacatggattccatcatcagccatcagccgctggaatataaccgttatcttaataagctggtcgcgtgggcgtggttcaacggcctgctgacgtcgcgaacgcatctgtttattaagggcaacggtattgtcgacctgcctaagttacaggagatggtcgccgatgtttcgcaccatttcccgctgcgcttgcctgctccgacgccgaaagcgctctacagcccctgtgaaattcgccatctggcgattatcgttaacctcgaatatgacccgacggcggcgtttcgcaataaagtggtccattttgacttccgtaagctggacgttttcagctttggcgaagagcaaaactgtctgataggcagtatcgacttgttatatcgcaactcgtggaacgaagtgcgtactctgcactttaacggcgagcaggcgatgatcgaagcgctgaaaacgattctggggaaaatgcaccaggatgccgcgccgccggatagcgtggaggtgttctgctacagtcagcatcttcgcggcctgattcgcacccgtgtgcagcaactggtctccgaatgtattgagctacgtctttccagcacccgtcaggagaccggtcgcttcaaggcgctgcgggtttccgggcagacgtgggggctattcttcgaacgcttgaatgtctcggtgcagaagctggagaacgctatcgaattctacggcgcgatttcgcataacaagctgcacgggctgtcggtacaggtggaaaccaaccaggtgaaattgccgtcagtggtggatggcttcgccagcgaagggattatccagttcttctttgaagaaacaggcgatgagaaaggctttaacatttatattctggatgaaagtaaccgggcggaagtatatcaccactgcgaaggtagcaaggaagaactggtgcgcgacgtcagtcgcttctattcgtcatcgcacgatcgcttcacgtatggctccagttttatcaactttaacctgccgcagttctaccagatagtgaaaaccgatggccgcgcgcaggtgatcccattccgtacgcagcctatcaacaccgtgccgccagcaaaccaggatcatgacgcgccgctattgcagcagtatttttcgtaagtgctgcgccgggcaaagctgcccggccggcgttcaccgcttcacattaacttcacccaacttcgttaccgtgacctccgcatttggtttacaggaggaggtttgaggtggcagatgcgttcattttgttagggatagtcatggcgatggtcagcctcggcttcattcttataaataagttattctgttttatatctgctgggtgcctgctctcgttatgcgccagcatggccagttttcaactctgggatgcatcttactgggggcgatggggaaaagtatgtcccggcctggatgtgatcatctcctgcgacaattaccattttctctatgacttgggatgggaattgtacggtatcgcctttttgttctttaccgcgttaatgctcacatgtgcggccattattcttatcaatatgattatggctttagagcgatactgtgccggatggcggcgctaacgcgccttatccagcctacattcgaagaatgctcattgagcggaacaaggtttagataatattttttcttatacaatttatgtagtaatattcagaccgttcaaaatgctatcgcgtccttcattgttttcgtaaatatgttttgaaaaactatattagaaacaaaagctctttaatggtttcttatggatgtttttataaaaggatattatatgtcaataaacaaccctattcttatttgcgtgaataagaaacgacaaataaaattagctctgttttattcagtggtagctatagctcttatgatgagcctctttctaaattatagtattatgctaaagatggtgtgtgtttttttaatactcctcatgatagcaggcgcaagtgcttactggtactccgccttttcaggaaagccacagctaacgttgaaccaggagggagtaacattacacacaaccaggctaccaatagtttactggcatgaaatcgactatgttggtgagcgtgttagcgataatacgcctgtgctggccatttttgtcaaagatgttgagctttattgtcagcgaattactaatgagaaaatgcgtaataattttctgtcattattgaataagcatgaaagtaatcgcgtgatgaatatctctctaaacgatctcgattatgactcagatgagttacaggatatttttaaaatggctgttgccagaaacctggaacaatagggtagagatatatgttttttgttattactcaccatattgatgtgctgcctctggcaaccctacccacacatgaaacatgcccttattgtaataatcaggatgtatggttgattattcgccaaaaaaggacccgtacatgtggtctgtctcaagcgagaaaaagagataagtttggtttagcgatatgcaatcattgcagcaatgaaatcaaggaaaaacgttggtcaccagcgttacgtcaactttttaccgagcagaagccactatttaacctaaccttttggcaacgctacggtttttgggttggttggttgagtgtatggcccgcgctgtttctggcaacctggctgtatttcacatttcggggttggtaatacgaccgcatatctcgttaaatatacgcaggaaagcgctattcttctggctctcctgcggaattaaaacttagcgaaaactcaccttttcacccgcttgttgcgttgccgcctgctccagcagatcccagaaggtttcgccgctgcgatcgcaaacccactcgtcgcctttcagatcgaaatgatagccgccctgtttggtcgccagccacacctggtgcaacggctcctgacggttaataatgatcttactgccgttctcaaagctgagggtcagcacgccgccgttgatttcgcagtcgatatcgctgtcgccgtcccagctatcgaggcgttcttcaatggtgagccacagggcgtcagccaggcgatgaaattcactgtcgttcattgttttatcccgctattgagtgatagcgccagtataaggggaagcgtcagcttctggaaccgatacgaattaccgttgtgagcggtaaaggataaaactcagcggtaggtaaatgacgataaatagcgcaccggtgataagtatgacggacgcgttaaccgggaaatggttcagagccgacagcattgccaccatcagtgcgacgcagccgccgcagaggagaaaatgcaacaggattaagggggcgcgcggctttgctttgatatccaaaagagcgctaagcagaccgagtaccgcgcttatcgtcaggactccggcagcttcaacaccgtttatcgtgccgtgcataatgctttcaataatgacgtaaatgcatgaaccgatccccacgccccgaagggcgtttttcaaatgtttaatcaagtgcgcaaaacggtttagcggcgtcatttttggcattccggtgcctgcgttatgatgatgatgtctttattgttggtgtacatgacgttcctattcagagtatgcgtcttatccgggcagggggatgctgttcggtaaagctggctgccaatccacgtataaactagcggttgtcatacgcaaaacgctcggtgacttttagcggcccattgatgctaaagacatgaataccctgaccttgctggctatcacgcataaaatagccatgctcttttccggcgttaatttcccggttcaggaagggggttgcgctatccagttccagccctgagttgccgggttaatcaatgaattgggtaaccgacgcaggcgtttgaaactcacctccggcaacgaaagattgttctcctcttctggctggagataaaccacgccgctgccttgccgctgataaacattgtgcggagattcactcagccggcatccccaggcgggaggcagcagaagtgaaagcgaaaaaaggcaaaacaaattacgatattgcataaggtcatccggacgtggtacgtaaacctaaagtgatgagcaaagcatgtttcctgatgtaaatgcgcaataatcatggcaacgcgccgcttttcagattttataaagagcccctaaacgcttgcttttacgccttctcctgcgatgatagaaaatagaaagcatgaacttacaggcaatccataatgaaaaacgtgtttaagacactcgctgtacttctgactctgttcagcctgacgggctgcggtttgaaagggccgctttatttcccgccagccgataaaaatgcgccgccgccgacgaaaaaagtcgattcgcaaacgcagtccacgatgcccgataagaacgatcgcgcaacgggagatggcccgtcccaggtcaattactgaggatagttttctgtccccgcgtgaacggagtgaatgatgcaattctctaaaatgcatggccttggcaacgattttatggtcgtcgacgcggtaacgcagaatgtctttttttcgccggaactgattcgtcggctatccgacagacacctgggcgtagggttcgatcagctgctggtggttgagccgccctatgatcctgagttggactttcattaccgcatcttcaacgccgacggcagtgaagtctcgcagtgcggcaatggcgcgcgctgtttcgcgcgatttgttcgcctgaaagggctaaccaataaacgcgacattcgggtcagtaccgcgaatggccggatggtactgagcgtcacggaagatgaactggtgcgggtgaatatgggggaaccaaactttgaacccgcgcaggtgccttttcgcgccaacaaagcggaaaagacgtatattatgcgagcggcggaacagaccatactgtgcggcgtggtttcaatgggcaatccgcactgtgtcattcaggttgataacgtcgacacggcggccgttgaaacactggggccggttctggaaagccatgagcgttttccggaacgcgccaacattggttttatgcaggttgtaagacgtgagcatatccggctgcgagtctatgaacgcggcgcaggggagacccgcgcgtgcggcagcggcgcgtgcgctgccgttgccgtggggattcagcaggggctgctggctgaagaagtacgcgtggaattaccgggcggtcggctggatatcgcctggaaaggtccgggtcatccgttatacatgactggtccggcggcacatatctacgacggatttatccatttatgaagcaaccagaggaagaactacaggaaacgctcacggaactggacgatcgagcggtcgtcgattacctgcgccaccaccctgagttttttatccgtaacgcccacgccgttgaagcgatgcgtgttccacatcccgtgcggggaacggtttcgctcgttgagtggcatatggcccgcgcgcgtaatcacatcaatgtgcttgaagaaaatatgacgctgctgatggaacaggctcatgccaatgaaagcctgttttatcgcttgctgcatctgcaaagccgtctggtcgccgcggatagtctggatgagatgctggtgcggtttcaccgctgggcgcgcgatttggggcttgccggcgcgacgctgcgtttgttcccggatcggtggcgtcttggcgcgccatcgcgctatacacatctggctttaaaccgtcaggcctttgagccgctgcgtattcaacggctgggacagtcgcagcattatcttggcccgctaaacggcccggaactgctggtggtcttgccggaggcgaaggctgtaggctcggtagccatgtcgatgatgggcagcgatggcggcctcggggtgattctcttcagcagccgtgacccgcatcactatcagccgggacaggggacgcagcttttacaggagatcgcgctgatgctgccggaactgctggaacgctggattaaacgcgtatgacggatgtcgcgctttctcaggatgtctcgcggttcctgcgctatttaggcgtggagcgccagcttagccccattaccctgctgaactaccagcgtcagcttgatgccattatcgctttagccggagaaaccgggctgaaaagctggcaacaatgtgacgctgcgattgtgcgcagttttgcggtgcgcagtcggcgcaaagggcttggccctgccagtctggcgctacgtctctcggcattgcgaagcttttttgactggttagtcagtcagggcgaattgaaagctaacccggcaaagggtgtctccgcaccgaaagcgccgcgtcatctgccgaaaaatattgatgtcgacgacgttaaccgcctgctggacatcgatcttaacgatccgctcgccgtacgtgatcgggcgatgctggaggtcatgtacggcgcggggctgcgtttatccgaactggttggcctggatataaagcacctcgatctcgataccggagaagtgtgggtaatgggtaaaggcagcaaagagcgacgcctgccgattggccgtaacgcggtgacgtggattgagcactggttggatctgcgcggcctgttcgccagcgatgaagaggcgttattcctgtcgaagctcggcaagcgtatctccgcgcgcaatgtccaaaaacggttcgccgaatggggcataaagcaggggctaaacagccacgtgcatccacataagctgcgccattcgttcgcgacccatatgctggaatcgagcggcgatctgcgcggcgtgcaagagctgctgggtcatgccaacctttccaccacccaaatttatactcatcttgattttcaacatcttgcttcagtgtacgacgcggcgcatccgcgcgctaaacgggggaaataatgcgtttttaccggcctttggggcgtattgccgcgctcacctttgacctggatgataccctttatgataaccgtccggtgattttgcgtactgagcaggaagcgctcgcttttatgcagaattatcacccgtcgctacgttcgtttcaaaacgtcgatttacagcggatacggcaggcggtgcgtgaagcggagccggaaatctatcatgacgttacccgctggcgccatcgcgcgatagagcaggccatgcgggatgcgggattatcggcgcaggaggccattgccggcgcgaatgcggcgatgatgcattttgccaaatggcgcagccagattgaggttccgcaggctacccatgagacgttacagcagcttgcgaaaaaatggccgctggtggcgatcactaacggcaatgcccagccggaactgtttggcctcggcgattactttaagtttgtactgcgcgccggcccggatggacgttccaagccctttagcgacatgtatttcctggcggcggaaaaactgcatgtgccgatcggcgagatcctgcatgtcggcgatgatctgactaccgatgtggctggcgctattcgctgtgggatgcaggcctgctggattaaacctgaaaatgccgacctgatgcggacgcaggacagccgtttactgccgcatatcgaaatttcgcggttggcatctctcacctcgctgatataatcaccagtagttctgtataaattcccagttattctggcggatggcgctatgcttatccgccctacgataagtagccccggtaagcgaagcgccaccgggcgtttttagttttcatgtttttacgcggcggtgccaatggacgtttcttacctgctcgacagccttaatgataaacagcgcgaagcggtggccgcgccacgtagcaacatgctggtgctggcgggcgcgggaagcgggaaaacccgcgtgctggtgcaccgtatcgcctggttactgagcgtagaaaacaactcgccatattccatcatggcggtgacctttaccaataaagcggcggcggaaatgcgccatcgtattggccagttgatggggaccagccagggcggaatgtgggtagggacgttccacggtctggcgcaccgcctgctgcgcgcgcatcatatggacgctaatttgccgcaggatttccagattctcgacagcgaagatcagatgcgtttgcttaaacgcctgattaaggcgatgaatcttgatgagaagcagtggccgccgcgtcaggcgatgtggtacatcaatagccagaaagacgaagggctacgcccgcaccatatccaaagctatggcaacccggtggagcagacctggcagaaggtgtatcaggcctatcaggaagcgtgcgatcgcgctggtctggtggattttgccgagctactgctgcgcgctcatgaactatggctgaacaagccgcacatcctgcaacactatcgcgagcggtttactaacatcctggtggacgaattccaggataccaacaacattcagtacgcctgggttcgtctgctggcgggcgataccggtaaggtgatgattgtcggcgacgatgaccagtcgatctacggctggcgcggggcccaggtagagaacatccagcgcttcctcaatgatttccccggcgcgcagaccattcgtctggagcagaattaccgctcgaccagcaacatccttagcgcggcgaacgctctgattgagaataacaatgggcgtttgggtaaaaagctgtggactgacggcgttgacggcgaaccgatatcgctgtactgcgctttcaacgaactggatgaagcgcgctttgtggttaaccgtatcaaaacctggcaggacaacggcggcgcgcttgcgcaatgcgccattctttatcgcagcaacgcccagtcgcgcgtgctggaagaagcgttattacaggccagtatgccgtaccgcatttacggcggtatgcgcttcttcgaacgccaggagatcaaagatgcgctctcttatctgcgtttgattgccaatcgcaacgatgatgccgcctttgaacgcgtggtgaataccccaacgcgcggtatcggcgaccgcacgctggacgtggtgcgccagacctcgcgcgatcgccagctaacattgtggcaggtgtgccgtgaattgttacaggaaaaagccctggccgggcgtgcggccagcgcgctgcaacgctttatggaactgatcgacgccctggcgcaggaaaccgccgacatgccgctgcatgtgcagactgaccgggtgatcaaagattccggcctgcgcaccatgtatgagcaagaaaaaggcgagaaaggccagacgcgcatcgaaaacttagaggaactggtgacggcaacgcggcagttcagctacaacgacgaagatgaagatttgatgccgttgcaggccttcctctctcacgcggcgctggaagcgggcgaggggcaggcggatacctggcaggatgcggtacagctgatgacgctgcactcggccaaaggcctggagtttccgcaggtgtttatcgtcgggatggaagaggggatgttccccagccagatgtcgctggatgagggcgggcgtttggaagaggagcgtcgtctggcctacgtcggcgttacccgtgccatgcagaaactgacgctaacctatgccgaaactcgccgtctgtatggtaaagaggtttatcatcgcccgtcgcgtttcatcggcgagttgccggaggagtgcgtggaagaggtccgtctgcgcgccaccgtcagtcgtccggtgagccatcaacgaatgggaacgccgctggcggaaaacgacacaggctacaaactcggccaacgcgtgcgccatgcgaagttcggcgagggaactattgtcaacctggagggcagcggcgagcatagccggttgcaggtggcttttcaggggcaagggatcaaatggctggttgccgcgtatgcgaagctggaaacggtttgaccgactctcatagtgccggatggcgcgtcttatccggcctacgcgctggctaacattttgatttgtaggccggataaggcgaagccgccatccggcgatatattgatgttaatattctgaaatcatagataaatactctcactctgctaacctttctgcataaggggaaattattgctttttcgcgtttcgttgcgtgttgacggcaaatttttgctggcgtaacatgcgcccacgattacgctaagaggacattcgccttggacacacccagtagatactggctcattatcctgtcatccaggatcaactcctaaggctatccctttttgctgatagccttagcggttgtcagcgacctttcattttttcccgtcgcgttgagtcaggctgtttaatggtctgaaacccaatttgtttctgtgtgcccatctgaactgtccgatatttttacgcattgggagtcccggtcatgctgagcgcatttcaactggaaaaaaaccgactgacccggctggaagtcgaggagtcacaaagcctgattgatgccgtatgggtcgatttggtcgaaccggacgacgacgagcgattgcgcgtacaatctgagctgggccagagtctggcgacgcgtcctgaactggaagatatcgaagcatccgcgcgcttctttgaagacgaagacggactgcatatccactccttcttcttcttcgaagatgcggaagatcatgccggtaactctacggtggcattcactattcgcgatggccgtctgtttacgctgcgtgaacgcgaactgcccgccttccgtttgtatcgtatgcgcgcccgcagccaggcgatggtcgacggtaatgcttatgaattactgctcgatctgttcgaaactaaaattgaacagttggcggatgaaatcgaaaacatctacagcgatctggaaaaactgagccgcgtcattatggaagggcatcagggcgatgaatacgacgaagcgctctccacgctggcggaactggaagatatcggctggaaggtacgcctgtgtctgatggatacccaacgcgcgctgaacttcctggtgcgcaaggcgcgcttaccgggcggacagctggagcaggcgcgtgagatcctgcgcgatatcgaatctctgctgccgcacaatgaatcgctgttccagaaggtgaacttcctgatgcaggcggcgatgggtttcatcaacatcgagcagaaccgtattatcaaaatcttctcggtggtttccgtggtgttcctgccgccgacgctggtcgcttccagctatgggatgaacttcgagtttatgccggaactgaagtggagctttggttatccaggcgcgattatctttatgattctggcggggcttgcgccgtatttgtactttaagcgcaagaactggctgtaagacattaaggccagggtgattcagctgcggctgaaccaccctgaaaagttacaggctccaggtattgatacctttaacctctttttcatagaaccacttatttgtattgacgccgacataagctgcgacaacaagtccaagtatgttaacgccgattaatgctccaataaatattgcaacgatccctaataaaataactataattgcttttttccacagacccagtacaaacaaataaatccatgagaagaaaaaggcaataaagtttatttgaatagtcaaccgttgtcggggctttaatgctttaaatgcctgtttatattctgggcttactttccaaaatccagggaaaccatgttgatcgtaaaatgaaaaacggtatttccatttttcagatagcgaaccatcattaatataatccttgtccatgtaaactccattaaattacttgttgagtgaattcgaatccgggggggccagaagtagcagagaaaaggttgcaaaataccagattagaaaaagaggcataccaaagccatcgcaagcgaaatcttcagcaaccattatcacgaaggaggcaatatagattacaagcgtaccccatacatagaattttatatattcaaagccactgtctctgaatcgctgacagtttaaattaatgacgagataatgtagtaaaattgtgaataaaattgccagtatcacaaagcttaaatataataaaaccccaaccaaaatggaaaatattatatttattagcgcgaatgataataaataacgacatctggaaacacatctctcagatgaaggaataaaaacacttaacattaatttcacatccatatgttgggttacgtcgttagcatgacaatatgctaccccccttacaaggggaggcatattttttcagattatatttagaataatagtcgcgttattttttacgctgcgtataaatcgcatccatcacgaaaatcgccagcgcgacccagataaacgcaaatgtcaccatcttatccgcgcccggcacttcgccataaaacgtcaccgccagtaaaaacatcagcgttgggccgatatactggaaaaagcccagtgtagaaagacgcagacgcgtagccgctccggtgaagcacagcagcggaatcgtagtgaccacacccgccgccattaacagcaagttcaacgatagtgcgttttgccccatatggctggtagggctatcggcgatgccaaacagataaatcgcggcgaccggcaacagccatagcgtttcaaccagcatacccgtctgcgcttcaacggcgatcttcttacgcaccaggccgtaaaacgcaaaactaaacgccagccccagcgcgataatcggcagcgagccaaaggtccagagttgcaccagcacgccgcacaccgccagaatcaccgccagccactgcattcgacggaagcgttcgccaagaaaaatcatccccagcaagatgttaaccagcggattaatgaaataacccaggctggcctccagcatatggtgattatttaccgcccaaatgaacaatagccagttaccgccgaccagtacggcggacagggccagcaggaaaatcttctttggcgttttcagtaagcgcttaacctgtcgccactgccggctgacgctaagcagcgccaccataaagaaaaatgaccaaatcacgcggtgcgtcaggatctcatctgcgggaacgtaatagatcagcttgaaatacgcgggggcgatcccccaaataaaataggcggcaagagcgagtaatacgccctgccgtgtttgttttgcgtccatccggaaaactcgtatctgaagtgtaacaacagtttacctgcttttatcccaccatataagtagcggtggcgctggcgatgtacagctgatcttcattgtgtaattccacgcgggcgacggccactttattccctgcgcgcagcaggctactggtggccgtaaagcggttgcctctgcccggacgcaggtaatcgacgcgcaggtcaatcgttcccatccgcgacaggcgctggcgtagttcatcttcgctgatggtttcgtggcgagttagcgtgctgccgacgcataccagtccggcggcgacatccagcgcagaggcgatcacgccgccgtgtaaaatgctttgcgcccagttgccgaccatcatcggctggttgttgaaggccagttgggcgaacgctttttcatagcgttccagctccagccctaacgcccgattaaacggcatgtggtagacaaacatttcacccactaatttcagagcttgttcagcggtaagtacagcggacatagattcctgacacctcattagttaatgaaatgttgatattatgcttcttaattgttgttttctactttaagaagggataactaacggctatgtgtgtaaatatgtaaaaatggttggcagagaatgattcaagctgaaaatacttcgtcaggagaacgtcaagaatgcgggcgattttgagagggttgttgccagccacgctactgccattagcggcatatgcacaagaagctacgataaaagaggttcatgatgcgcctgcagtacggggaagtatcatcgctaacatgctacaggagcatgataacccttttacgctttacccttatgacacgaactacttgatctacacgaacaccagcgatctgaacaaagaggccataagtacctacaactggtctgaaaacgcacgtaaagatgaagtgaaatttcagttgagcctggcgtttccgctgtggcgcggaatactggggccgaactcggtactgggcgcttcctatacgcagaaatcctggtggcagctttccaacagtaaagagtcttcgccgtttcgcgaaaccaactacgaaccgcagctttttcttggttttgctaccgattatcgctttgccggctggacgctgcgcgacgtagagatgggctacaaccatgactctaacggacgttcggaccccacctcgcgtagctggaaccgtctgtatacccgtctgatggccgaaaacggtaactggctggtagaggtcaaaccgtggtacgtgattggcagtaccgatgataatccggacatcaccaaatatatgggttattaccagcttaaaatcggttatcacctgggcgaggcggtattaagcgccaaaggccagtacaactggaatacaggctacggcggcgcggaagttggattaagctatccggtcactaaacatgtccggctttatacccaggtgtacagcggctatggcgaatcgctgatcgactataattttaatcagacacgtgtcggcgtcggcgtgatgcttaacgatatcttctgattggattgtgttttaaacattgcagtttctctcgcaggcgctgaaaatagcgcctgttttgatttatggtgaacggggttaatgtggcgcaggcggaagtgttgaatctggaatcaggggccaaacaggttttgcaggaaacctttggctaccaacagtttcgcccgggtcaggaagcgattattgatactgcgctctccggtcgcgactgtctggtcgtcatgcccaccggcggcggcaaatctctgtgctatcaaatccccgcgttgttgctggacgggttgactgtcgtcgtttcgccattaatctcgttgatgaaagaccaggtcgatcagctactggcgaacggtgtggcggcggcgtgcctgaactccactcaaagccgcgagcagcagcttgaggtgatggcggggtgccgtaccggacagattcgtctgctgtatattgcgccggaacgcctgatgctggacaactttcttgatcatctggcgcactggaatccggtattgctggcggtggatgaagcgcactgtatctcgcaatggggacatgatttccgtccggaatatgcggcgctcggtcagcttcgccagcgttttcccgctttgccgtttatggcattgaccgccaccgccgacgacaccacgcgccaggatattattcgtctgcttgggcttaacgatccgttaatccagattagtagctttgaccgaccgaatatccgctacatgctgatggagaagtttaagccgctcgaccagttaatgcgctatgttcaggagcaacgcggcaaatcgggtatcatctactgtaacagccgggcgaaagtggaagataccgctgcgcgcttgcaaagtcgcggcattagcgcggcggcctatcatgcggggctggaaaacgctattcgcgtcgatgtgcaggaaaaatttcagcgcgacgatctgcaaatcgtggtggcgaccgtcgcttttggaatgggcataaacaaacctaacgtacgtttcgtcgtgcatttcgatatcccgcgcaatattgaatcctactatcaggaaacgggccgcgccgggcgcgacggactgcctgcggaagccatgctattttacgatccggctgatatggcctggctacgtcgttgtctggaagagaaaccagccggacagcttcaggatattgaacggcataaactgaatgcgatgggcgcttttgctgaagcgcaaacctgccgccgcctggtattgcttaattactttggcgaaggccgacaagaaccgtgcggcaactgcgatatctgtctcgatccgcccaaacaatatgatggcttaaacgatgcccagattgcgctttctaccattggtcgggttaaccagcgttttggcatgggctacgttgtcgaggtgatccgcggcgcgaataaccaacgcatccgcgatttcggtcatgacaaactcaaggtttatggcatgggacgcgaaaagagccatgagcactgggtgagcgtgattcgccagctcattcatctggggctggtaatgcaaaatattgcgcagcactccgcattacagttgacggatgccgcgcgtccggtactccgtggagacgttccgctaaagcttgcggtgccgcgcatcgtcgccctcaaaccccgcgtgatgcagaaatcgttcggcggtaattacgatcgcaaattgttcgctaagttgcgcaagctgcgtaaagctatcgctgatgaagagaatatcccgccgtatgtggtctttaacgacgccacgttgatagaaatggcggaacagatgccggtttccgccagcgagatgttaagcgttaacggggttgggatgcgcaaactggagcgcttcgggaaagaatttatggcgctcatccgcgcgcatgtcgatggtgatgacgaagagtagtcagcccggcaaaaaagtgccaggatggtgactcactgaactatttccccgcgagccatttttatgatgatgctatttttcaccgtggcaatggtgcacatcgttgcgctaatgagccccggccccgactttttcttcgtgtctcaaactgctgtcagccgttcgcgtaaagaagcgatgatgggcgtactgggcatcacctgcggcgtgatggtatgggcgggcgtggcgctgcttggcctgcatctcatcatcgaaaaaatggcctggctgcatacgatcattatggtaggcggcggcctgtacctgtgctggatgggctatcagatgctgcgcggcgcgctgaaaaaacaggatgcggcggcgtcttctccgcacattgaactggcgcagagcgggcgcagctttctcaaagggctgctgaccaatctgtcgaatcctaaagcgattatctattttggttccgttttttcactttttgtcggcgataacgtcggcgctgcggcgcgctggggtattttcgcgttaatcaccctggaaacgctggcctggtttaccgtagtcgccagcctgttcgcgctgccgaaaatgcgccgtggctatcagcgtctggcgaaatggattgatggctttgccggcgctctgtttgcgggctttggtattcacctgattatttcgcgctaatttacctccgggccggataaacatcatccggcacgactatcacgcgtgtcttgccgacgccaggagcgcgcctaccagcataaacaacgaaccaaacgctttattcagcgccttcatctgctttggtcctttaatccaggcggcaatgcgctgcgccagtgtggcgtaaccggtcatcacaaccatatccaccacaatcgtggtgacgccgagaatgaggtactgcgccagttgcggttgctgcggcatgatgaattgcggaaacagggcggcaagaaagacaatacttttgggattggttagattgacaaatatcgcccgtttgaacagccgaccccgcgattgcgtctgggcgagggtatgcagatcgatagcgcctgcggcgcgccattgctggatacccagccagataagataagccgcgccagcccatttcagaatttcaaaagcgaggagcgagcgcgaaaagagcgtacccagtccgacgcccaccagtacgatatgtatccccagcccggtctggagtccggcgatagaagccactgcgccacgatatccatggttgatagacgtcgtcatggtattgatggcgcctgaacccggagaaagactcagcagagttgaggtcagtagataggcgaaccaccattcaaaggtcatgcgaaactccctggttgtctgtttttgtgccacaatacgctactgccgctgtgttgtgtcaggcacgacgcaaaaaacgattttacctggtaaacgaggccgaaaacccgatgtttcagcagcaaaatgactgggaaacaagagaaaatgcgtttgccgcttttgctatggggccgctgaccgatttctggcgtcagcgggaagaggcggagtttatcggcgtgggtaacattccggtgcgctttgtccgttttcgaaatgattccaacgatcggacgatcgtcatttgtcctggccgcattgagagttatgtaaaatacgctgaactggcgtatgacctttttcatctcggttttgatatcttcatcatcgaccaccgtggtcaagggcgctccgggcggatgttatcggacccgcatcggggtcatgtcgatcattttaacgattatgttgaggacttagcggcgttctggcagcaggaaattgagccggggccgtggcgtaagcgttatatcctggcgcactcaatggggggcgcgatagccaccctgttcctgcaacgccatcgtgtgcggtgcgacgctattgcgctcaccgcgccgatgtttggtattgtgatacgcttgccttcctttatggtgcgccatattctcgactgggccgaagggcaccagcgtatccgtgaagattacgctattggtaccggtcagtggcgggcgttgccgtttgggatgaatgcgctgacccacagccgccagcgttatcagcgcaacttacgattttatgccgacgagccgcagctgcgcgttggcggccccacctggcattgggtacgcgaaggcattctggcgggtgagcaggtactggctggggcgagcgatgacacgacgcctacgctactgattcaggcggaagaagagcgggtagtggataaccgcacccacgatcgtttttgtgaaattcgcgccgcggcgggatacccttgtgaagggggaaaaccgctggttatcaaaggcgcgtaccatgagatcctttttgaaaaggacgccatgcgctcagtcgcgcttaacgccattgttgaatttttcaacaagcctaatttatccagcggaaatcgctttgcttagaggttaaattttattatgtatcaggttgttgcgtctgatttagatggcacgctgctctcccccgaccatacgttgtccccttatgccaaagagactctgaagctgttgaccgcacgcggcatccattttgtctttgccactggtcgtcatcatgtcgatgtagggcaaatccgcgataatcttgaaatcaagtcttacatgatcacctccaacggcgcgcgagtgcacgataccgacgggaatttggtttttacgcataatctggacagcgacattgccagcgacctgttcggggtggtgaatgcgaacccggacatcgtgactaacgtttatcgcgacgacgaatggtttatgaatcgtcatcgccccgatgaaatgcgttttttcaaagaggcggtatttaactactcgctgtttgagcctgcgctgctggagccggagggcgtcagcaaagtgtttttcaccagcgacactcatgaaaagttgttgccgctggagcaggcgattaacgcgcgctggggcgatcgggtaaacgtgagcttctctacgctaacctgtctggaagtgatggcgggcggagtgtcgaaaggtcatgcgctggaagcggtcgctcaggcgatggggtacagtctgaaagagtgtatcgcctttggcgacggaatgaacgacgctgaaatgctcacgatggcgggcaaaggctgcatcatgggcaatgcgcaccagcgtctgaaagacctgtatcccgaacttgaggtgatcggcatcaacgcggataacgccgtgccgcattacctgcgcgatcttttcttacgctgatgtgattgtttgttagttgaccagttgtcaacttcactctccgctacaatgggtgttccctgttttaagagacatccattgtggcgctactcatcattaccactatcctgtgggctttctcctttagtttatttggcgagtatcttgccgggcatgtcgatagctatttcgcggtgctgatacgcgttgggctggcggcgctcgtttttctgccgtttttgcgtactcgcgggcacaacctaaaaaccatcagcctgtatatgctggtgggggcgatgcagcttggcatcatgtatatgttgagcttccatgcttacctctacctgaccgtatccgaactgctgttgtttaccgttctgacgccgctctatatcacgctgatttacgatgtgatgagtcagcgtcgtttgcgctggggctatgcatttagcgcgttgctggcggtgattggcgccgggattattcgctacgatcgcgtgaccgaccatttttgggtcggtttgctcctggtgcagctttctaatatcagtttcgctatcggaatggtggggtataaacgtctgatggagacccgtcccatgccgcagcacaacgcctttgcgtggttctatctgggggcgtttttggtggcggcggtggcgtggtcgctgttggggaacgcgcaaaagctgccggaaaccacgctgcaatggagcattctggtgtttctcggcgtggtggcgtcaggcattggctactttatgtggaactatggcgctacccaggtagacgccgggacgctgggtatcatgaataacatgcatgttcccgcaggactgctggttaatcttgccatctggcatcagcagccccactggccaagctttattacaggcgcggctgtgatcctggcttcgctgtgggtgcatcgaaaatgggtcgctccgcgctccgcacaaacggcagatgatcgcaggcgtgatcccgcgtcgagcgaataaacgcctcggtcaccgcctgacgctggtcgccgtcgcgcacggcggcatacaggcggctccacagaccatcgccaagggttttggtcaccaccagaccctggcgctcaacgctttccaccacccagtgcggcagggcggcaatacccattctggccgccaccatctgaatcagcagtagcgtattatccacgcttttcagcagcggactgatacccgccggttgcaggaaatgtcgccagacatccagtcggctgcgctgcaccgggtaaatcaacagcgtttcgctggctaaatcttccggcgtaatctgcgttttgctggccagcggatggtcgggcgccagcaccagtcggacttcaaaatcaaacatcggcgaataatgcagtccgctacgcggcaaaatatccgacgtcatcaccaaatccagctcgccttgttgcaaggccggttgcggatcaaaagtgacgccggaggtgaaatccatttctacctgcggccagcttgcacggaagttttccagcgccggggtcagccactgaatacagctatgacattcaatagcgatgcgcagacgagtttgctgcggttcgttgcacgcctgcagcgcacggctgatttgcggcagcacttggtttgccagttgcagcagaacttccccctgcggcgtaaagcgcagcggctggcttttacgcacgaacaggcggaagccaaggcgttgttccagatcgctgaactgatgagacagagcggattgggtctggtgcagcaccgccgccgcggcagccagcgatccactattccgcaatgcctggagtgttttcagatgtttaatttcgatcatgaaagtccttcacttcgccatgaacaaattgcgcttgaggaatatacagtacctttacattatggatgtgtaaacatccagacgtctaaaactcgtcatatttcgacttgcagatgcgttggcttccttgcttaccccagtcacttacttcagtaagctcctggggatgcgctgtgtcgccgccttcctgcaagccgaactatttagagttttactttcagattcaataaaataagagaggaagtaaaatgacaatattgactcataccctcggttttcctcgcgttggcctgcgtcgcgagttgaaaaaagcgcaagagagctactgggcggggaacacaacgcgtgaagcgttactggcggtggggcgcgaactgcgcgcgcgtcactgggagcagcagaaacaagcgggtattgacctgttaccggtaggcgactttgcctggtacgaccatgttctgaccaccagcctgctgttaggcaatgtgccggctcgtcatcagaacaacgacggttccgtggacatcgacactctgttccgcattggccgcggtcgcgcgccaaccggcgaaccggcggcggcagcggaaatgaccaaatggtttaatactaactatcactacatagtaccggagttcagcaaaggccagcagttcagactcacctggacacagttgctggaggaagtggacgaagcgctggcgctggggcataagatcaaacccgtactgctggggcctgtcacgtatctgtggctgggtaaagtgaaaggcgagccgtttgaccgcctgacgttgctgaaagacattttgccggtgtatcagcacgtactggctgaactggcaaaacgtggtattgagtgggtccaaattgatgagccagcgctggtgctggaactgccgcaggcgtggctggatgccttcaaaccggcttacgacgcgctcgccggccaggtgaagctgttgctgacgacctattttgaaggcgtgacgccaaacctggacactattatcgcgctaccggtacaggggctacatgttgacctcattcatggcaaagatgatgtagcggaactgcatcaacgtctgccggtcgactggctgctctccgcaggcttgattaacgggcgtaatgtctggcgcgccgatttgaccgaaaaatacgcgcagattaacgccattgtgggcaaacgcgcgctgtgggtagcatcctcctgctctttgctgcacagcccgatcgatctcagcgtcgaaacgcgtctggatacggaagttaaaagctggtttgcctttgcgctgcaaaaatgcggtgaactggcgttgctgcgcgatgcgctgaacagcggcgaaacggcggcgcttgaggaatggagcgcaccgattcaggctcgtcgtcactcccgccgcgtacataatgccgcggtagaaaaacgcctggcggcgatcaccgcgcaggacagccagcgtgagaatccgtatgaggtgcgcgctgaagcgcaacgcgcccgctttaaacttcccgcctggccgacgacgactatcggttcgtttccgcaaaccacggagattcgcggtctgcgtctggacttcaaaaagggcaacctcgacgcgaaccactaccgcaccggcatcgccgaacatatcaaacaggctatcatcgagcaggagcgtttagggctggatgtgctggtacacggcgaagccgagcgaaacgacatggtggaatacttcggcgagcatctggacggcttcgtctttacccagaatggttgggtgcaaagctatggctcccgctgtgtgaaaccgccggtagtgattggcgatatcagccgtccggcaccgattaccgtggagtgggcgaaatatgcccagtcgctgaccgacaagccggtaaaagggatgttgaccggcccggtgactattctttgctggtcattcccccgcgaagacgtgacccgcgaaacgattgcgaaacagattgcgctggcgctgcgtgatgaagtcgcggatctggaggcggcggggatcgggattattcagattgacgaaccggcgctgcgtgaaggtttaccgctgcgtcgcagcgactgggacgcctatctggaatggggtgtggaagccttccgcatcaacgcggcggtggcgaaggatgaaacccagatccacacccacatgtgttactgcgagttcaacgacattatggattcgatcgccgcgctggacgcggatgtgatcaccattgagacctcccgctcggatatggagttgctggagtcgttcgaagcgttcgactacccgaacgaaatcgggccgggcgtgtacgatattcactcgccgaacgtgccgagcgtcgagtggattgaagccctgctgaagaaggcggcacaacgtattccggcacaacgcctgtgggtgaatccggactgcggtctgaaaactcgcggttggccggaaacccgcgcggcgttagcgaacatggtcaaagcggcgcacaatctgcgtcaggcgaaataacccatcctggccgctgcgtttatccggcagcaatgcggcgctaccctttgacgggtagcgcccgtgcctgacctgattaacagcgcctctatctcctcttttttctcatttccctttttcttattttccgcgctgtctttttcaggatctggctatttggcgatcttgataataaaaaggttctccgtatgaatgacaaccaggcggatagcgtccccggaagcagagcggcggcttttattgcctcgcagatcgtttttcctgtcatgatcgcccagcgctctcatagcacaaaacgaggttttccattctgttatgttccctggcgacgataaacgtcgcattgtctcatggcgctggtgaaccttattttttaacggagatgtctgacatggcggtagcaggttgtcacgtaatggccaaacccggcggcgcgatctgcaatattgattgcacatattgcttctatcttgaaaaagaggcgctgtacccggaacgcaataaaaactggcggatgtcggacgagacgctggaacaatttatacgccagcatattgccgcgcagagtggcgaccgcattgactttgcctggcagggcggcgaaccgaccatgatggggctaccgtttttccgtcgggttgtcgcattatgtgaaaagtacggcgatgggcgaaaaatcactcatgcgttgcagacgaacggcatcctggtgaatgacgagtgggcgcgctttttcgctgaacagcattttctcatcggtctctctatcgacggcccggcgtcgttacacaaccactatcggtttaatcgcgctggaaaaggaactcatgaacaggtcgtcgcagccatggcgcggcttaaagcgcaccatgtcgactttaataccttaaccgtcgtgggaaaacataacgtcggtcatgcagcagacgtctacgaatttcttctggcggcgggatcgcgttttattcagtttatcccgctggtagagcgaatgagcaccgataactcatcggtacttaatctggtgatgcccggcgaaagcgcggcgacgctggcgccatggacggtaccgtcgtggcaatatggcgaatttctcaaccagatctttgatatctgggttcgtcgcgacgtagaccgcgtctatgtgcagatgtttgacgtggcgttagccgcctggacggcgcagcagccggtactgtgtgtacattccgagacttgtggacatgccttcgcgttggagtcgaacggcgatctctacaactgcgaccactttgtctacccggagcatctgctgggaaatatccaccagcacagcatcaaagccttaaataatagcgagcgggctattgcctttggcgaggccaagcgggagaccctgaccgccgattgtcgtcgctgtgactaccgctttgtatgtcatggcggctgtcctaagcatcgctttgccgtctcgccgtctggtcatcctgcgcataattacttgtgtgcgggctataagcattttttccagcacgttacgccgtatatgaatgtctggcgggagctgctggcgcaaggctatccgatggcatcgatcatgcgctggctggcgcaggacgcgcgtaaagacacaggagccgtcagtcgtaaccatccctgtccctgcggcagcggcaaaaaatataaaaaatgctgtggtaaagcatagctaacgtggcgatgacgctttgttgagcctacaccgactccggtctcgtaggcccaacaaacatcgtaatgcgctgtggttagccttttttcccaccgtactgcgcgaaccattccagcattctttgccagccgtctttcgctgaggcttcgtggtagcccggacgataatcggcattaaacgcgtgccctgcatcgggatagaccacgatttccgccttcgcattagcggcgcgtagcgcctgacgcatggtttccacgctctcctgtggaatactggtatcctgcccgccgtataaacccagtaccggcgcgttaagatcggtggcgatatcaacgggatgcttcggcgaattgagtgacgtgtcgcccaccagcttgccgtaccatgctaccgccgcttttaactgtgggttgtgcgcggcgtacagccaggtaatccggcctccccaacaaaaaccggtgatcatcagccgatgcgcatccccgccgttgcgcgaagcccaactggcgacgtgatccaggtcggcaaggacttgcgaatcgggtactttagccaccagcccgctcaataatgtgggtatatcggcgaaatcattggggtcgccttcgcggaaatagagctccggcgcgatagcgagatagccttccagcgccagtcgtcggcaaatatcgcgaatgtgttcatgtacgccaaaaatttcctgtaccacaatgaccaccggcagcgcgccgtcgctcgcttttggtctggcgtaataggcgggcatatcgtcgccctgagagggaatcgacgttatccccgcgctaatggccccatcaggcgtatgaatcatcgtaggggcaagtggggaggctgcaggtgcaaagccggatggatgtgtcgttgtcatggtattctccgtacccttaaaaaatagcgcaatcttaactatagacagtgtgtaacaaaccacattgccttaaagcggctatcttttgtgcaatgcctggcgatattgattatttattgtgatgaacatcactttttaatggtaagcgagtgcaattgttttacgtcatagtgatggctgtcacgaaaatatctttatgccttaggtaaagtgtctctttgcttcttctgacaaacccgattcacagaggagttttatatgtccaagtctgatgtttttcatctcggcctcaccaaaaacgatttacaaggggcccagctcgccatcgtccctggcgatcctgagcgtgtggaaaagatcgccgcgctgatggataagccggttaagctggcatctcaccgcgaattcacctcctggcgcgctgagctggatggcaaagcagttatcgtttgctctaccggtatcggtggcccgtctacctctattgccgtggaagaactggcgcaactgggtattcgtaccttcttgcgtatcggcaccacgggggctattcagccgcacattaacgtcggcgacgttctggtaacgaccgcatccgtacgtctggatggggcgagcctgcattttgcgccgatggaattcccggcggttgccgactttgcctgcaccactgcgctggttgaagccgcgaaatcgattggcgccacgactcacgttggcgtaaccgcctcttccgacactttctatccgggtcaggaacgttacgacacctattctggccgcgttgttcgtcgcttcaaaggctctatggaagagtggcaggcgatgggcgtgatgaactacgaaatggaatccgctacgctgttaaccatgtgcgcaagccagggtttacgcgcaggtatggtggcgggcgttatcgtcaaccgtacccaacaagagattccgaatgcggaaacgatgaaacaaactgaaagccacgcggtgaaaatcgtcgtggaagcggcccgtcgtctgctgtaattctcctctcttttgcaaaggccgacgcgttcggccttttctttttgcgtggcgcctcgcaggaaatcccttttaaactggacgtttatacagcacaattctattttgtgcaggacagtgtggttccaggagaggtgttgtggatattactcttatgataagcgccgtcgtggcgctggcggctggggcggtgattggctggctggcgacgaaagcgcacgccgatcaaatccgcgccgatcttatcgaagaacggcgtgagctggatatcgaacttagcgcggcccggcagcaattagcgcaagaagcgcactggcgcagtgaatgcgagttacttaataacgaactgcgtagcctgcacagtattaatacctctctggaagccgatctgcgtgaagtcacgacccgtctggaagcgactcagcaacacgcggaagacaaaatccgtcagatgatcaacagcgaacagcgtttaagcgagcagtttgaaaatctggcgaaccgtatctttgaacacagtaatcgtcgcgtagacgaacaaaaccgacaaagcctgaatagcctgctgacgccgctgcgtgagcaactggacggttttcgccgccaggttcaggagagttttggcaaagaagcgcaggagcggcatacgctggcgcacgaaattcgtaatttgcagcagcttaacgcgcaaatggcgcaggaagcgatcaacctgacgcgcgccctgaaaggggacaataaggcgcaaggaaactggggcgaagttgtgctggcgcgggtgctggaggcatccggactgcgtgaaggctacgaatacgaaacccaggtcagtattgagaacgatgcgcgctcgcggatgcagccggatgtcatcgtccgcttgccgcagggcaaagatgtggtcatcgacgctaaaatgacgttggtcgcctacgagcgttactttaacgctgaagatgactacacgcgcgaggccgctttacaagagcacatcgcctcggtgcgcaatcatattcgcttactggggcgtaaagactaccagcagcttcccggcctccgctcgctggactatgttctgatgtttatccccgtagaacccgctttcctgctggcgttagataaacagcccgaactgataaccgaggcgctgaaaaataacattatgctggtaagccccacgacgctgctggtggcgttacggacaatcgccaacctgtggcgctatgaacaccagagccgcaatgcgcagcacatcgcagacagagccagtaagctctacgataaaatgcggttgttcgttgatgatatgtcagcgatcggtcagagtctggataaagcgcaggataactaccgccaggcgatgaaaaaacttgcgtcggggcgtggcaacgttttggcgcaggcggaggccttccgggggctaggcgtggaaatcaaacgcgagattaatccggatttagcggaacaggccgttacgcaagatgaagaatatcgtttacgatcgatccctgaagggcggcaggatgaacattatcccaatgatgaacgggtgaagcagcagttaagttaacccatacggagtagtttagtcctggcgcagagtagggcaaattggcccaatctgttacacttcttgaacatttttatcgataagcaggcactgagatggtggaagattcacaagaaacgacgcactttggctttcagaccgtcgctaaagagcagaaagctgacatggtggcccacgtttttcattctgtggcgtcaaagtacgatgtgatgaatgacttaatgtcatttggcattcatcgtttgtggaagcgcttcaccattgattgcagtggcgtgcgtcgtggacaaaccgttctcgatttagcgggtggtacgggcgatcttaccgcgaaattttcacgtatggtcggggaaactggcaaagttatcctggcggatattaatgattccatgctcaaaatggggcgtgagaagctgcgtaatatcggcgtgatcggcaacgtagagtatgtgcaggcgaatgccgaagctctgcctttccctgataatacgtttgattgcattaccatttcgtttggtttgcgcaatgtaacggaaaaagaaaaagcgctgcggtcaatgttccgtgtgttgaaacccggcggacgtttactggtgcttgaattttccaagcctatcattgagccgctgagtaaagcgtatgacgcctattctttccatattttaccgcgtattggctcgatggtcgcaaacgatgcggatagctatcggtatctcgcggaatccatccgtatgcatcccgatcaggataccttaaaagccatgatgcaggacgccggatttgagagcgtggattattacaatctgacggcgggcgttgtggcattgcaccgtggttataaattctaggagggtggaatgccttttaaacccttagtgaccgcaggaattgaaggtctcctcaatacgtttctgtatcgttcgccagcgctgaaatcagccagaacgcgcttacagggaaaagtactgtgtgtgaaactaaagggattttcgatgccattagtcctggtattcagtgaacgccaggttgatgtgctgggggcatgggaaggcgaagcggactgtacggtaatcactcaagctagcgttttgccaaaactacgcgatcgtcagcagttggccacgcttattcgcagcggcgaactggaagtgcagggcgatattcaggtcgtgcaaaattttgtggcgctcgccgatctcgccgaattcgatcctgcggagctgttggcgccatacacgggtgatattgcggcggaaagtatcggtaaggtcgtgcgtggcggggctaaattcctgcgccacgggtttcaacgccagcagcgttatgccgctgaagcgatcactgaagagtggcgtatggcgcctggcccgctggaagtcgcatggtttgccgaagaaaccgcggctgttgagcgcgccgtagattctctgaccacacggctggaaaaactggaggccaaatgacgccaggtgaagtacggcgcctatatttcatcatccgcacgtttttaagctacggccttgatgaactcatcccccgaatgcgtcttacactgccactccgattatggcgctattcgctgttctggatgccaaaccggcataaagataaattgctgggtgaacgattaagactggcgttgcaagagctgggaccggtctggatcaaatttggtcagatgctctccacgcgccgtgacctgttcccgccgcaaatcgccgatcagctcgctttgctccaggataaagtcgcgccattcgatggtcggctggcgaaagcccagattgaagaggcgatgggggggctacctgtcgaagcctggtttgacgactttgatatccagcctttagcgtcggcgtcaatcgcccaggtacataccgcgcgattgaaatcaaacggtaaagaagtggttattaaggtcattcgcccggatattttgccggtaattcaggcagacctgaaactgatttatcgccttgctcgctgggtaccacgcctgttgccggatgggcgtcgtctgcgcccgacggaagtggtgcgtgagtatgagaaaacgctgatcgatgagctgaatctgctgcgggaatcggccaacgcgattcagttacgccgcaattttgaaaatagtcccatgctgtatatcccggaggtgtactccgattactgtagccagaacatgatggtgatggagcggatatacggcattcctgtttcggatgtggcggcgctggaaaagaacggcaccaacatgaaactgctggcggaacgcggggttaaagttttcttcacccaggttttccgcgacagctttttccatgcggacatgcatccgggaaatatttttgtcagccatgaacaccctgaaaacccgcaatatatcggcattgactgcggtatcgtcgggtcgctaaacaaagaagataagcgttatctggctgaaaactttatcgcgttttttaatcgcgattaccgaaaggtggcagaactgcatgtcgattcaggctgggttccgccagataccaacgttgaagattttgagtttgccatccgcaccgtctgtgaacctatctttgaaaagccgctcgcggaaatctcgtttggtcatgtgttgttaaaccttttcaatacagcgcgtcgatttaacatggaagtccagccgcaactggtgttgttgcagaaaacattattgtatgttgaaggggttgggcggcaactttatcctcagcttgatttgtggaaaacggcgaagccgtttcttgagtcctggatcaaagatcaggtgggtattccggctctcacgcgggctcttaaagaaaaagcgccgttctgggtcgaaaaaatgccagaaatacctgaactggtgtacgacagtttgcgccagggcaaatatttacagcacagtgttgataagattgcgcgcgagttacaggtaaaccatgtgcgccaaagtcagtctcgttatttattgggaattggcgcaacgctgttactgagcgggtcattcttactcgtcaaccgccctgaatggggattgatgcctggctggctcatggtcggcggcgtagttgtctggctggttggctggcgtaaaactcgttgagattttttatcgctcaacgccggttgtgtcacgcaggtacatattatcactcgaggcaatactcaggccgcaagtcaatgtcgtcccggtcgtatgtaaaagtatgtgaatagggcgggcgaaagcggctaacaaagaggcagcgtgaaggataatgtgtataatgcggccctaataattcatcatctatcacagaggaacatgtatgggtggtatcagtatttggcagttgttgattgttgccgttatcgtcgtactgctgttcggcaccaaaaaactcggttccatcggttccgatcttggcgcgtctatcaaaggctttaaaaaggccatgagcgatgatgatgccaaacaggataaaaccagtcaggacgctgattttaccgctaaatctatcgcggataagcaaggcgaagcgaaaaaggaagacgctaaaagccaagataaagagcaggtataatccgtgtttgatatcggttttagcgaactgctgttagtgttcgttatcggcctcattgtgttggggccgcaacgattgccagtagcggtaaaaacggtagcgggctggattcgcgcgttgcggtcccttgcgacaacggttcagaatgaactgactcaggaactgaaacttcaggagttccaggacagtctgaaaaaagtcgaaaaggcgagcctggaaaatctgactcccgaactgaaagcatctatggatgaactgcgtcaggcggcggagtcgatgaaacgcacctacagcgctaacgatcccgaacaagcgagcgatgaagcgcataccatccataatccggtggtaaaagggaacgaaacgcagcatgagggcgtcacccctgccgccgctgaaacacaggcgagcgcgccggaacaaaagccggagcccgttaaagctaacgtgcctgagtcgacggaaaccgcttccgtagccacgatagacgccgagaagaaatccgctgcgcctgttgtcgaatcttccccctcgtcgagtgataaaccgtaaacatggctgtagaagatactcaaccgcttatcacgcatctgatcgagttgcgtaagcgcctgctaaactgcatcgtcgcagtacttctgatttttctggcgttaatttatttcgccaatgatatttatcatttagtcgccgcaccgctgattaaacagatgccgcaaggggcgacaatgattgcgacggatgtggcgtcgccgttttttacgcctatcaaactcaccttcatggtgtctttgatcttatccgcgcctgtcattttgtaccaggtttgggcctttatcgccccggcgctgtataagcatgagcgtcgtctggtcgtacctctgctggtatccagctcgctgcttttctatattggtatggccttcgcctattttgtcgtattccctttggcctttggtttcctgacgcatacggcgccggaaggggtacaggtttcgacagatatcgccagctatcttagctttgtcatggcgctttttatggcctttggcgtagcctttgaagtgccggtggcgattgtgttgctgtgctggatgggcatcaccacgccagaagatttgcgtaaaaaacggccttatatcctggtcggggcattcattgtgggaatgctgcttacgccgccagatgttttctcgcaaacgttgctggcgataccgatgtactgcctgtttgaaattggcgttttctgctcacgcttttatgtcggtaagcgacggacgcgcgacgaagataacgaggccgaaaccgaaaaggccgagcacactgaagactaaacacaaccgcccgccagggcggttgtcatatgggggcaagcatgtttgatattggcgttaatttaaccagtagccagtttgcaaaagatcgtgatgatgtggtcgcccgtgcgtttgcggcgggagtaaaaggtatgctactgaccggaacgaacatccatgaaagtcagcaggcgttaaaactggcgcggcgctacccccattgttggtcgacggctggcgtccatccccatgacagcagtcagtggtcacccgcgtctgaagacgccattattgcgctggcgaaccagccggaagtcgtcgctatcggtgagtgcgggctggatttcaatcgcaatttttccacgccgcaggagcaggagcgtgcctttcaggcgcagctacaaattgccgccgaattgcagataccaatctttatgcactgccgggacgcgcatgagcgatttctggtattgcttgatccctggctggatagtcttcctggtgcaatactgcactgctttaccggttcacgccagcaaatgcaggcctgtgtggatagagggctctatatcggtattaccgggtgggtttgcgacgaacgacgcgggcttgagctacgtgaactcttaccgtttattccagcggaaaagctactgatagaaaccgacgcgccgtatctgttgcctcgcgatcttacgccgaaaccaacgtcacgacgcaacgagcccgcgtatctgcctcacatcctggagcgcatagcgctatggcgtggtgaagatccgcaatggttagcggcgatgacagatgccaacgccagaaccttatttgaggttgtattctgaacgatcgctaaatcttgcgaaaaccggtgttttttacgctctgcttcacttctttattgagtaaattaagcagtaacatcgaacgcgtttcgccatccggttcggtaaaaatcgctttcagcccttcaaatgcgccttccgtgatgatgacgctatcgccgggatagggggtttcaggatcgacaacgccttcgggcttgtagatagaaagctgatgaataacgctggaaggcacgatcgcaggatgcgcgccaaagcgcacaaaatggctgacgccgcgcgtggcgttgattgtagtggtatgtatcacttccggatcaaattcaacgaacagataattaggaaagagcggttcgctgacggaggtacgttttccgcgtaccattttttccagggtgatcatcggtgtcaggcaacttaccgcttgtctttcgaggtgttcctgagcacgctgaagttgcccgcgtttgcagtacagtaaataccaggattgcataatgactcttatccgcttgttcggggcgcaagcatagcaaaagccatgcgcgaagttaattatacacttcatcctttaagccgtatctggattagcgttggttgccagagttcacgctaatttaacaaaaatacagcatcccgatgatgaacgccgtataatgatgcgcttaccaagaggctacaatggacgccatgaaatatcacgatttacgcgacttcctgacgctacttgagcagcagggggaactaaaacgcatcacgctacctgtggatcctcatctggaaatcacggaaatcgctgaccgcacgctgcgtgccggtggaccggcgttgctgtttgaaaatcctaaaggttacgccatgccggtgctgtgcaacctttttggcacgccaaaacgcgtggcgatgggcatggggcaggatgatgtttccgccttacgggaagtgggtaaattattagcgtttcttaaagaacctgagccgccgaaaggctttcgcgatctgtttgacaagctgccgcagtttaagcaagtgctgaatatgccgacgaaacggttacgcggcgcgccttgccagcagaaaatcgcgtctggcgatgatgtcgatttaacgcgtcttcctgtcatgacctgttggccggacgacgccgcgccgctgattacctggggactgacggtaacgcgtggtccgcacaaagagcggcaaaacctgggcatttatcgtcagcagttgataggtaaaaataagctgattatgcgctggctgtctcaccgcggcggcgcgctggattttcaggagtggttagccgcgcgtccgggtgaacgtttcccggtctccgtcgcattgggcgccgatccggcgacgatacttggcgccgtgactcctgttcccgatactctgtcggagtatgcctttgcgggcctgctgcgcggcacgaaaactgaagtggttaaatgcctttctaacgatctggaagtgcctgccagcgccgagattatccttgaaggttacattgagccgggagagatggcgccggaaggaccgtatggcgatcatacgggctattataatgaagtggatagctttccggtctttaccgtcacgcatattacacagcgtgaggatgccatctatcactccacctataccgggcgtccgcccgatgagcctgcggtattaggggtggcgctcaatgaagtcttcgtgcctattctgcaaaaacagtttccggaaatcgtcgacttttatctgccgccggaagggtgttcttaccgcctggcggtagtgacgatgaaaaagcagtacgctggtcatgcgaaacgcgtcatgatgggcgtctggtcgtttttgcgccagtttatgtatacgaaatttgttatcgtttgcgatgatgacgttaacgcacgcgactggaatgatgtgatctgggcgattaccacccgtatggaccctgcacgggatacggtgctggttgaaaatacgccgattgattacctggattttgcctcgccggtctccgggctgggttcaaaaatggggctggatgccacaaacaaatggccgggcgaaacccaacgcgagtggggtcgtcctattgttaaagatcctgaagttaccgcgcgtattgatgcgatttgggatgagctggctatctttaaataactgaaagcggacatcgacatttcaggctgcggcgactcagcttgaaaaatgtcggtattgacccgacacccgacagagggagcgcatgacaaccttaagctgtaaagtgacctcggtagaagctatcaccgataccgtatatcgggttcgtttagtgccggacgcggcgttttcattccgcgctggtcagtatttgatggtcgtaatggacgagcgtgacaaacgcccgttttcgatggcttcaacgccggacgagaaagggtttattgaattacacattggcgcctccgagctcaatctgtatgcgatggcggtcatggatcggattctgaaagaccgggaaatcgtcgtcgatattccgcatggcgacgcctggctacgtgacgatgaagagcgtccgttgattctgatcgcgggcggtacgggcttttcttatgtgcgctccatcctgttgacggcgttagcgcgcaacccggcccgcgatgttaccatttactggggcggccgcgaagaaaagcacctctatgatctctctgagctggaagcactctctgttaaccatccgaatttgcgtattgaacctgttgtcgagcagccggaagaaggctggcgtggacgtacaggaacggtacttacggcggtattgcaggattatggtacgctggcggggcacgatatttatattgccggacgttttgagatggcgaaaatcgcccgcgatctgttctgtcatgagcgtaacgcgcgggaagatcgtctgtttggcgatgcgttcgcatttatttaactattttatgggacgcagtagcgtccctttttacgttagcctacctaaaagtcctcttaaatattaattaatcgtcaactataaaaccttatgatattgaatatctacaggctttgtattgcgtgtaataaattaagtaatattatgtcctgaggctatcaataaaaatagttaattatatatgcttcatttatttttataaaagaaacataaaatggaaagttagttatttatttataagatggagagtgttatgaaatttaaatatgctttaacttctctcgcattatctgttgcaattttgtcatcagtaccttctactgctttcgccatcggcggcgccagcggcgctaaagtggactatcaggtccagggaaaaattggcgaagttgttatgaacccctatgatatcgcgccgctaaccgccgttattcgtaatggcggttaccagttacgtgacgtgcatgtacggattgtacccaaagaaaatggccaggagatcgcgtataaagttaataataaataccttttaacgtatggcggtattcccgtctttggtctttacccggattatgtcaataccgttgaagttgaatatacaagtatccagggtagtaaaaccgaaaatgtaaaagaaagctataaaatgtatgcaccgcctgcctatattgaatcagcgggtacaaaagaagaacaatcagcactctttactatcgatgttaaaaaggtttccccagaatttaaagatcgcttgtatcttttgaataatacgaaagataagtctgggaatggaacgcgtactgtctggaacaaccctactgggggtgcattagaatggaacttcactacagctaacgctattatcgacacctccggtgatattcgttggtttatgaatccaagttcaatttatgatttaaagtcaatttatcgtgctggcgttatgatgggctttaaacaaaactaggatggcgcactatcgtggggctacggtcagcgttatgtgaaatacgatatcatggggcgtgaaatctttaaccgccgcctgccggataattataacgatttttcacactcaatggataacgcggccaacggtcactacttcctgcgtgtagccagctctaactataaacgccctgatgggaaaaatgttcgtaccgtgcgtgatgtgattgccgaagttgatcagaacggcgtggtagtggatgaatggcgtctgtttgatatcctcgatccttatcgtgatgtgataatgaaaaccctcgatcagggcgctgtgtgcctgaatatcgacgccagccagtccggccatacgttgagcgaagaagatctggcggcgctggactcctccgacaaattcggggatatcgtgggtagtggggctggccgcaactgggcgcatgtcaacagcgtcgactatgacagtgaagatgattccatcatcatcagctcccgccaccagagtgcgattatcaaaatcggccgcgataagaaagtgaagtggatactgggtacgcctgctggctggaaagcgccatttaatgccgcaattctgacgcctgtggatagcaaaggccaaaaaatcgcctgccaggacagtggctgcgagggtgacttcgactggacatggacgcaacatacggcctttaaaattgatagtaagagtaaaggcgatatcttatacctttccgctttcgacaatggcgatggccgcggcttagaacagcctgctatgcagagtatgaaatacagccgctccgtgatttacaaaatcgaccagaaaaacaagacagtccaacagatctggcaatacggtaaagagcgcgggaacgagtggtttagcccggtaacctctatcaccgagtaccagactgacaagaattctgtgttcgtgtattccgcaacagcaggtggtgcgtttgatttatcggtaggcgcatttaccagcttgcctaatccgtatctggaagagttcaaatggggagaaaaagagcctgcggttgaaatgcaaatacatggtgcgcgtggatatcaggctatgccatttagcctgaccaaagcgcttactgagtagagcaggccatacggtgaaaaaacccgcccctgacgggcgggaaaaacggcaactaaactgtttcccgtcataattcgcgcagcctctttgttggctgcctttgctcaccccgggcacatagttatctatgtgcccggggattcgctcagttgccgctgcgctgcaatgcgagttatttaggggatattatctttgattaaacccgctcaaacaccgtggcgatgccctgacccagaccaatacacatcgtcgccagaccaaactgcgcgtctttgcgctccatcaggttgataagcgtggtgctgatacgtgctccggagcagccgagcggatgaccaagcgcgatcgcaccgccgttgaggttgatcttctcgtctatctgctccatcaatcccagatccttaatgcatggcaggatctgtgcggcaaacgcttcgttcatctcaaacacatcgatatcgctggctgacagtcccgcttttttcaacgccagttttgacgccggaaccggcccgtaacccataattgacggatcacaacccaccactgccattgagcgaatacgggcgcgaggtttcagacccagctcacgggcacgactttcgctcattaccagcatggcggctgcgccatcggaaagcgcggatgaggtgcccgccgtgaccgtgccactaaccggatcaaatgccggacgcagcgttgatagcgcttcgaccgtggtttccgggcggatcacttcatcgtagttaaactgcttcaacacgccgtctgcatcatgaccgccagtcgggataatctccgttttgaatgcgccagactgggtggcggcccaggcgcgagcgtgagaacgcgcggcgaactggtcctgcatttcccggctaatgccgtgcaggcgggagagcatttccgccgttagccccatcatccctgccgctttggcgacgttgcgactcagacccgggtgaaaatccacgccgtggctcatcggcacgtgccccatatgctccacgccgccaaccagacaaacctgcgcatcgccggtcatgatcattcgcgctgcatcgtgtaacgcctgcatcgaggaaccacacagacggttgacggtgaccgccggtaccgaatggggaatttctgccagcagcgcggcgttacgggcaatgttgaagccttgctccagcgtttgttgtacgcagccccagtaaatatcatcgagggtcgccgctgtaagcgacggattacgcgccagcaggctacgcattaagtgggcggagagatcttctgctcgcacgttgcgaaacgcgccgcccttcgaacggcccatcggggtgcgaatagcatcgacaatgacaacctgttccattgtgactccttaagccgttttcagagaaccaaccggacgggctggttcaaccgggggataatacggttcgttatggcgcgctttattacgcagcccttccggcacctcatacagcgggccgaggtgttgatactgctgcgccatatcaagatatttcgcgctgccctgtgtatccagccagcggaatgcgccgccgtggaacggagggaagcccaggccgtagaccagcgccatatcggcttccgccgggcttgcgataatgccttcttccagacagcgaaccacttcgttaatcatcgggatcatcatacgggcgattatctcgtcgtcgctgaagtcgcgtttcggctggctgacgcttgccagcaggtcatccaccgcggcatcttcttctttcttcggcttacccttgctgtcttctttatagcgccagaagcccagaccgtttttttgcccaaaacggctggcgtcaaacaatgcgtcgatcgcgtcgcggtaatctttctgcatacgctgtgggaagcctgccgccattactgcctgcgcgtggtgggcggtatcaatacccaccacgtcgagcagataggccgggcccatcggccagccgaactgtttttccatcactttatcgactttgcggaaatccgcgccgtcgcgcagcagttgactgaaaccggcgaaataggggaacagcacgcggttaacaaagaagccggggcagtcgttgactacaatcggtgtcttgcccattttgctggcccaggcgacgactttggcaatggtttcgtctgaactcttctcgccgcgaatgatttcaaccagcggcatccggtgtaccgggttgaagaagtgcattccgcaaaagttttccggacgttccagggcgcttgccagttcgccaattgggatggtggaggtatttgaggccagcacggtttccgggcgcactttctgctcggtttccgccagtaccgcttttttgactttcggattttcgactaccgcttcgacaacaacatctacgcgatcgaaaccggcataatcgagagtcgggtggatggtcgaaatgacgcccgccagcttcagaccgtcgatcttgccgcgctccagctgtttgttcagcagcttggccgcttcggtcatgccgaggttcaacgatttatcgttgatatctttcatgatgaccggtacgcctttccaggccgactggtaagcgataccgccgcccataatgcccgcgcccagtacggctgcctgtttcggcgtctcaatatctttggtcagctttttggctttaccttttacatattgatcgttgaggaagataccgaccagcgcacgagcctcattggtatgcgccagcggaacaaagcttttattttccagattcagcgcttcttcacgaccaaaacgcgcggcggcttcaatggttttcactgcggtcatcggcgccggataatgtttacccgccgtttgtgcgaccatgcctttagcgatggtaaagctcatcgctgcttcaatcttactgagtttcaacggttccagtttcggctggcgtttagctctccagtcgagatcgccggtaatggcctggcgtaacaccgctatcgcgccttcaattagcttctcttgtttgaccacgccgtccacaaggccgattttcagcgcgtgctcagcaccgacatctttacctgccgcgataatctccagcgcgctgtctgcgcccagcatacgcggcagacgaacggagccgccgaaacccggcatgatgcccagtttagtttccggcagaccgatacggaggtctggcgtcgccagacggtaatcggtggccagcacgcattcgcacccgccgcccagcgcatagccgtttacggcggcaagggtcggtacgggtaaatcttccagacggttaaagacgctattagcgaaatgcagccattggcttaactgctcttcggggacgaggaacagtgaaagaaattcggtgatgtccgcgccgacaataaaggccgctttattagagcgcagcagcagcccttttaaatcgtgttgcttttccagcacctcaagcgcctggccgaggctggcgacggttgcggtgtcgagtttattgaccgagcctggagcatcgaacaccagttcggcgatgccatcttccagccagtcgaggtacagggtgtcgcctttataaagcatgtcagtctcctgaatccacaaagtgatctggtcgtaccagatgaagcgaagtgtgtattttgtgttaaaaaaatgcaaataaatgattaaagaaatgccgatgtgatcacgctcggcagagatcacgctctcgtggggcgatgtgctaagatgcgggaacttgaggtcaaaaaaacagaagggtaaaaaatggaatcactggccgcgctctataaaaatcatattgttaccttacaagaacggacgcgcgatgttctggcgcgctttaagctggatgcgttacttattcattctggcgagcttttcaacgtctttctcgacgatcacccttatccgtttaaggtcaatccacagtttaaagcgtgggtgccggtaactcaggttccaaattgctggctgttggtcgatggcgtcaacaaacccaaattgtggttttatctgccggtcgattactggcataacgttgaaccgctgccaacgtccttctggacagaagaagtcgaggtcgtcgccttaccgaaagcggatggcatcggcagccaactgcctgccgcgcgtggcaatatcggctatatcggcccggttcctgagcgcgcgctacaattggatatcgccgccagcaacatcaacccgaaaggtgttatcgactatctgcattactaccgcgcctataaaacggattatgaactggcctgtatgcgcgaagcgcagaaaatggcggtgagcggtcatcgggcggcggaagaggccttccgttccggcatgagcgagttcgacatcaacctggcgtacctgaccgccacgggacatcgcgataccgatgttccatacagcaacattgtggcgctgaacgaacatgccgccgtgctgcattacacgaaactggatcatcaggcaccgtctgaaatgcgcagtttcctgctggatgcgggcgcggaatacaacggctacgcggcggatctgacgcggacctggtcggcgaaaagcgataacgactacgcccacctggtgaaagatgttaacgacgaacagttggcgctgatcgctaccatgaaggcgggcgtcagctatgtggattatcatattcaattccatcagcgcatcgcgaagctgctgcgtaaacatcaaatcattaccgacatgagtgaagaggcgatggtggaaaatgatctcaccgggccgtttatgccgcacggtattggtcatccgttgggtctgcaggtacacgatgtggccgggtttatgcaggatgattccggtacgcatctcgccgcgccgtccaaatacccgtatctgcgctgcacgcgtgtgttacagccgcgaatggtgttgaccatcgaaccggggatttacttcatcgaatcgctgttagcgccatggcgcgaaggcccgttcagcaagcacttcaactggcagaaaattgaagcgctcaagcctttcggcggtattcgcattgaagataacgtggtcatccacgaaaacggcgtggaaaacatgacgcgggatttaaaactggcgtaatggacagttggttaatccctgcagcgccggtcaccgttgttgaagagatcaaaaaaagccgctttattacgctattggcgcataccgatggcgtagacgcggcgaaagcgtttgttgagtcagtcagagctgagcatcctgatgcgcgccaccattgtgtggcgtgggtggcgggtgcgccggacgactcacagcaactgggcttttcagacgacggcgaaccggcgggaacggcaggcaagccgatgcttgcgcaattgatgggcagcggcgtcggagaaattactgccgtcgtcgtgcgctactatagtggtattctgctgggtacgggcgggctggtaaaagcctatggcggcggtgtgaatcaggcattacgtcagcttgccacacaacgcaagacgccattaaccgaatatactttgcagtgtgagtacggtcagttggccggaatcgaagcattattaggacagtttgccgggaagatcgtttccagcgattatcaggcgtctgttcggctcagggtggcgcttccttttgctcatgtgaatgcattttccacaaaactggcggattttagccgtggttcattgcaattgttagcgattgaagaataatccccacctcatttttaagaataaaggaagcggcagagatgcattttcgcgccattacccgaatcgttggactactggttatcttattttcggggacaatgattctcccgggactggtagcgctaatatatcgtgatggcgcaggaagagcgttcacgcagaccttttttgtcgcgctggcgatcggttccatactgtggtggccgaaccgtagggaaaagggcgagctgaaatcccgcgaaggatttcttatcgtggtgctgttctggaccgtgctgggcagcgtgggtgcgctgccgtttattttctcggaaagcccaaacctcaccattaccgatgctttttttgaatcgttctccgggttaaccaccacgggcgccactactctggtggggctggattcattaccgcacgccattctcttttatcgtcagatgctgcaatggtttggcggtatggggatcattgtgctggcggtggcgattctccctatcctcggcgtcggggggatgcagctctatcgggcggaaatgccggggccgctcaaagataacaaaatgcgcccgcgtattgccgagacggcgaaaacgctgtggcttatctatgtcttgctaacggtagcctgcgcgctggcgctatggtttgcagggatgcccgcgtttgacgctatcggacacagcttctccactatcgctatcggcggcttctcaacgcatgacgccagcgtaggctattttgatagtcccactattaataccatcatcgctattttcctgctgatctccggttgtaactatggcctgcatttctctttattaagcgggcgtagcctgaaagtatactggcgcgatccggaattccgcatgttcatcggcgtacagttgacgctggtggtgatctgcacgctggtactgtggttccataatatctacgactcggcgctgacaacgctaaatcaggcgttcttccaggtcgtgtcgatggcgacaacggcagggtttaccacggacagcattgcgcgctggccgctgtttttgcccgtcttgctgctatgttccgcgtttattggcggttgcgccgggtcaacgggcggggggttaaaggtcatccgtattctgttgttgtttaaacaggggaaccgcgaactcaaacgtctggtgcatccgaatgccgtttacagtattaagctggggaaccgggcactgccagaacgtattctggaagccgtctggggattcttttctgcctacgcgctggtatttatcgtcagtatgctggccattatcgctacaggcgtagatgatttctcggctttcgcctcggtagtggctacgcttaataacctgggaccggggctgggggtggttgctgataacttcgccagtatgaatccggttgcgaaatggatactaatcgccaacatgctatttggtcgtttggaagtattcactttgctggtactttttaccccgactttctggcgtgaataatggagtaacacgtgaaaacattgattcttttctctacccgggacggacaaacgcgcgaaattgcctcttatctggcttctgaactcaaagatatggggatctgggccgatgtcgttaatctgcatcgcgcagaagagcctgactgggatagctatgatcgcgtagtgattggcgcgtctattcgttatggtcattaccacagcgcctttcaggagtttgttaagaaatatgccacgcggttgaacggaatgccgagcgccttttattccgttaacctggtggcgcgtaaagctgaaaaacggacgccgcagactaacagctacgcgcggaagtttttaatgagctctccgtggcgacctgactactgtgccgtcattgcaggcgcgcttcgctatccccgttatcgctggtatgaccgtctgatgatcaagcttattatgaagatgtcgggcggcgaaacggataccagtaaagaagtggtgtacaccgactgggagcaggttgcgcactttgcccgtgaaatagcccatttaaccaacaaatcgtcggcaaaataaacgcaaagaataaaaagtgcgcactcagaaaattattttaaatttcctcttgtcaggcaaaaataactccctataatgcgccaccactgacacggaacaacggcacacaggccgccgggtcagcggggttcggaccagaacctcacggagaaaagcgaaaataaacgcttgactctgaagcgggaaagcgtaatatgcacaccccgcgccgctgagaaaaagcgaagcggcactgctctttaacaatttatcagacaatctgtgtgggcactcgaagatacggattcttaacgtcctaggacgaaaaatgaataccaagtctcaagagtgaacacgtaattcattacgaagtttaattcattgagcatcaaacttttaaattgaagagtttgatcatggctcagattgaacgctggcggcaggcctaacacatgcaagtcgaacggtaacaggaagcagcttgctgcttcgctgacgagtggcggacgggtgagtaatgtctgggaaactgcctgatggagggggataactactggaaacggtggctaataccgcataacgtcgcaagaccaaagagggggaccttcgggcctcttgccatcagatgtgcccagatgggattagcttgttggtgaggtaacggctcaccaaggcgacgatccctagctggtctgagaggatgaccagccacactggaactgagacacggtccagactcctacgggaggcagcagtggggaatattgcacaatgggcgcaagcctgatgcagccatgccgcgtgtatgaagaaggccttcgggttgtaaagtactttcagcggggaggaaggtgttgtggttaataaccgcagcaattgacgttacccgcagaagaagcaccggctaactccgtgccagcagccgcggtaatacggagggtgcaagcgttaatcggaattactgggcgtaaagcgcacgcaggcggtctgtcaagtcggatgtgaaatccccgggctcaacctgggaactgcattcgaaactggcaggcttgagtcttgtagaggggggtagaattccaggtgtagcggtgaaatgcgtagagatctggaggaataccggtggcgaaggcggccccctggacaaagactgacgctcaggtgcgaaagcgtggggagcaaacaggattagataccctggtagtccacgccgtaaacgatgtctacttggaggttgtgcccttgaggcgtggcttccggagctaacgcgttaagtagaccgcctggggagtacggccgcaaggttaaaactcaaatgaattgacgggggcccgcacaagcggtggagcatgtggtttaattcgatgcaacgcgaagaaccttacctggtcttgacatccacagaagaatccagagatggatttgtgccttcgggaactgtgagacaggtgctgcatggctgtcgtcagctcgtgttgtgaaatgttgggttaagtcccgcaacgagcgcaacccttatcctttgttgccagcgattaggtcgggaactcaaaggagactgccagtgataaactggaggaaggtggggatgacgtcaagtcatcatggcccttacgaccagggctacacacgtgctacaatggcgcatacaaagagaagcgacctcgcgagagcaagcggacctcataaagtgcgtcgtagtccggattggagtctgcaactcgactccatgaagtcggaatcgctagtaatcgtggatcagaatgccacggtgaatacgttcccgggccttgtacacaccgcccgtcacaccatgggagtgggttgcaaaagaagtaggtagcttaaccttcgggagggcgcttaccactttgtgattcatgactggggtgaagtcgtaacaaggtaaccgtaggggaacctgcggttggatcacctccttaccttaaagaaacggtctttgaagtgctcacacagattgtctgatgaaaaacgagcagtaaaacctctacaggcttgtagctcaggtggttagagcgcacccctgataagggtgaggtcggtggttcaagtccactcaggcctaccaaattttccctgaatactgcgttgtgaaataactcacatactgatgtatgcttcgttattccacgccttgtctcaggaaaaattatcggtaaagaggttctgactacacgatggggctatagctcagctgggagagcgcctgctttgcacgcaggaggtctgcggttcgatcccgcatagctccaccatctcgtgagtgtttacgaaaaaatacttcagagtgtacctgaaagggttcactgcgaagttttgctctttaaaaatctggatcaagctgaaaattgaaacacagaacaacgaaagttgttcgtgagtctctcaaattttcgcaacacgatgatgaatcgtaagaaacatcttcgggttgtgaggttaagcgactaagcgtacacggtggatgccctggcagtcagaggcgatgaaggacgtgctaatctgcgataagcgccggtaaggtgatatgaaccgttataaccggcgatttccgaatggggaaacccagtgtgattcgtcacactatcattaactgaatccataggttaatgaggcgaaccgggggaactgaaacatctaagtaccccgaggaaaagaaatcaaccgagattcccccagtagcggcgagcgaacggggaggagcccagagcctgaatcagcatgtgtgttagtggaagcgtctggaaaggcgcgcgatacagggtgacagccccgtacacaaaagcgcatgtgctgtgagctcgatgagtagggcgggacacgtggtatcctgtctgaatatggggggaccatcctccaaggctaaatactcctgactgaccgatagtgaaccagtaccgtgagggaaaggcgaaaagaaccccggcgaggggagtgaaaaagaacctgaaaccgtgtacgtacaagcagtgggagcacaggtttacctgtgtgactgcgtaccttttgtataatgggtcagcgacttatattctgtagcaaggttaaccgtataggggagccggagggaaaccgagtcttaattgggcgttaagttgcagggtatagacccgaaacccggtgatctagccatgggcaggttgaaggttgggtaacactaactggaggaccgaaccgactaatgttgaaaaattagcggatgacctgtggctgggggtgaaaggccaatcaaaccgggagatagctggttctccccgaaagctatttaggtagcgcctcgtgaattcatctccgggggtagagcactgtttcggctagggggccatcccggcttaccaacccgatgcaaactgcgaataccggagaatgttatcacgggagacacacggcgggtgctaacgtccgtcgtgaagagggaaacaacccagaccgccagctaaggtcccaaagtcatggttaagtgggaaacgatgtgggaaggcccagacagccaggatgttggcttagaagcagccatcatttaaagaaagcgtaatagctcactggtcgagtcggcctgcgcggaagatgtaacggggctaaaccatgcaccgaagctgcggcagcgaacgtatcacccaagacaactttacggagttgacgattgacggagcgaagcgacgtcaaagcgttcattaaagtcgagttggcttagggatacgttcgttgggtaggggagcgttctgtaagcctgtgaaggtgtgtcgtgaggcatgctggaggtatcagaagtgcgaatgctgacataagtaacgataaagcgggtgaaaagcccgctcgccggaagaccaagggttcctgtccaacgttaatcggggcagggtgagtcgacccctaaggcgaggccgaaaggcgtagtcgatgggaaacgggttaatattcccgtacttggtgttactgcgaaggggggacggagaaggctatgttggccgggcgacggttgtcccggtttaagcgtgtaggtgtgtgttccaggtaaatccggttcactttaacactgaggcgtgacgacgaggcactacggtgctgaagcaacaaatgccctgcttccaggaaaagcctctaagcatcaggtaacacgaaatcgtaccccaaaccgacacaggtggtcaggtagagaataccaaggcgcttgagagaactcgggtgaaggaactaggcaaaatggtgccgtaacttcgggagaaggcacgctgacacgtaggtgaagtgatttactcatggagctgaagtcagtcgaagataccagctggctgcaactgtttattaaaaacacagcactgtgcaaacacgaaagtggacgtatacggtgtgacgcctgcccggtgccggaaggttaattgatggggtcagcgtaagcgaagctcctgatcgaagccccggtaaacggcggccgtaactataacggtcctaaggtagcgaaattccttgtcgggtaagttccgacctgcacgaatggcgtaatgatggccaggctgtctccacccgagactcagtgaaattgaactcgctgtgaagatgcagtgtacccgcggcaagacggaaagaccccgtgaacctttactatagcttgacactgaacattgagccttgatgtgtaggataggtgggaggctttgaagtgtggacgccagtctgcatggagccgaccttgaaataccaccctttaatgtttgatgttctaacgtggacccgtaatccgggttgcggacagtgtctggtgggtagtttgactggggcggtctcctcctaaagagtaacggaggagcacgaaggttggctaatcctggtcggacatcaggaggttagtgcaatggcataagccagcttgactgcgagcgtgacggcgcgagcaggtgcgaaagcaggtcatagtgatccggtggttctgaatggaagggccatcgctcaacggataaaaggtactccggggataacaggctgataccgcccaagagttcatatcgacggcggtgtttggcacctcgatgtcggctcatcacatcctggggctgaagtaggtcccaagggtatggctgttcgccatttaaagtggtacgcgagctgggtttagaacgtcgtgagacagttcggtccctatctgccgtgggcgctggagaactgaggggggctgctcctagtacgagaggaccggagtggacgcatcactggtgttcgggttgtcatgccaatggcactgcccggtagctaaatgcggaagagataagtgctgaaagcatctaagcacgaaacttgccccgagatgagttctccctgagacttagagtctcctgaaggaacgttgaagacgacgacgttgataggccgggtgtgtaagcgcagcgatgcgttgagctaaccggtactaatgaaccgtgaggcttaaccttacaacgccgaagatgttttggcggattgagaagacaacaattttcagctcagattcagagtccgaaggattttacgctgagacaaggcggcaaacgcagcgacggaaggagcatacagaagtatgtgactgacgctcgcaagagcagccaacgccgtatcagtgtaaaagacacaggacggagcacaaagaatttgcctggcggcactagcgcggtggtcccacctgaccccatgccgaactcagaagtgaaacgccgtagcgccgatggtagtgtggggtctccccatgcgagagtagggaactgccaggcatcaaataaaacgaagggccctgtcggaagacagggccttttgttttatctgtggtctgtcggtgagcactcgttgcgcagcaacggcccggagggtggcgggcaggacgcccgccataaactgccaggcattagtttagtgaagaagcccatcctgacggacgggcttttttgcgtgtgcggtaactgtaaaaccgtaggcctgataagcgcagcgccatcaggcaaccggcactgccggatggcggctccgccttatccggcctacaaggaacgtgctttctctaaccaccgcaaaatgaaggcagaaatctgcgatacatcattaagatccaaaacgggtaccgctacggcaagtggaatatcactggcaaccgcaataacatgctcatcaagaattaattcttcctcgctgtgcccacatccctgacgaaaaagtaagatcttcgcaactgcctcgtgtttaaacccttctaccagcaccatatctagctttgatgcatccatccggctcaccagccatgccagatccaactcttcttgccccggcgtttcagtcattaacgcccagcgctgctgactggcaaccagcgtctgtgccgccccggctttacgtaattcgtagctatctttacccggtttatcaacatccatatcatgatgggtatgcttaatcagccctggccgaataccgtgcgcacaaagtgctgggatcagttttttcagcagtgttgtttttcccgtgccgctccacgcggcaatggcgagtagcggtatcatggtctcttttgccattgcgcgagttcctccggcgtgttgacgttcacaaatgcctccttacaatcgctgaaatcaacggcgtgtccgcctacctggcgcataaaaatcattacccgccgctcgcctgcttgcaaataagctgtcaactggggctcaacggcacgattaatcaacgcgatcgttggatgatcgcgctctccatcatgaacccaaaccacgggtgcaccatgacgctgcgctgctaaacgatcgaccaggttgtgggggatacagggattgtcacagggacaaaacagaaaccagtcgcctgctacctgctgaaaaacggaaagcatacccgccagcggaccgggaaagtcagcaattgaatccggaatgactttcaggccgctggcctggtagatatccagatggcgattagcactaatgacgaccgtagcaagttgtggcgcgagcgcgtcggcaacgtgtcgccagagcggtttcccgcccagttcaagcagacctttatccgcacctcccatccgcctggctttaccgcctgccagcaccacgccggttattacttcatccagattcaccgatatcgcctcttttattgtgggattgaccctgctaccgtgtctgtatcaagaataaggagcacagctatgaaatgtaaacgcctgaatgaagtcattgaactcctccagccagcctggcagaaagagcctgatcttaatctgacgcaatttttgcagaaactggcgaaagagtcaggttttgacggcaaactggaagatttaactgatgatatcctgatctaccatctgaaaatgcgcgattccgccaaagacgccgccattccagggattcaaaaagactatgaagaggactttaaaacggcgcttttacgcgcccgcggcgttattaaagagtaaaaccttgtaagcggcgccaccgaaatcgccacgaaatgatatcctgaatcattcgtagtattttccggatgatgggatgaacgacaacgcttttactttccagacgctacacccggaaaccatcatggatgcgctgtttgaacaggggatcatggtggattccgggctaactccactaaacagttatgaaaaccgcgtctatcagtttcaggatgaagaccgtcgacgttttgtcgttaagttttatcgtcctgaacgctggtctgttgatcaaattcgggaagaacatcaattcgcgcttgaactggtgaaggatgaggttccggttgctgctccgctcgcgtttaatggccagacgctgttagcgcatcagggctatcattatgccattttccccagcgtaggcggtcgtcagtttgaagcagacaatatcgatcagatggaggcggtagggcgttatcttggccgattgcatcagacggggcgaaaacgtcctttcactttccggcctgacattgggcttgcggagtatctttttgaacctcgccaggtattcgaagatgccgcactgattccctccgggcaaaaagcggctttcctgaaagccactgatactctactgtctgcagttaccgaatgctggcgcaccgatttcgccacgctgcgattgcacggcgattgtcatgccggcaacattctatggcgtgatggaccgctgtttgtcgatttagatgatgcccgtaacggtccggcgatacaggatttatggatgctgctgaacggcgacaaagccgaacagcgaatgcagcttgaaaccattattgaagcttatgaagaagttagtgagttcgatacggctgaaattggtctcattgaacctttacgcgccatgcgtttagtttattatcttgcctggttgattcgtcgttggggcgatcctgcgtttccaaaaaactttccctggttaacaggggaagattactggcagcgacagacaacgacttttattgagcagactaaaattttgcacgaaccccctttacaattaacgccaatgtattaatcggagagagttgatcatgaaaaagatttggctggcgctggctggtatggttttagcttttagcgcctcggcagcacagatcagcgacggtaaacagtatatcacgctggataaaccggtcgctggcgaaccccaggtactggagtttttctccttctactgcccacattgttatcagtttgaagaagtgcttcatgtgtctgacaatgtgaagaaaaagctgccggaaggcaccaaaatgaccaagtaccacgttgagttcctggggccgttgggcaaggagctcacccaggcatgggcggtggcgatggcgttgggtgtagaagataaagtcacggtcccgctgtttgaagccgtacagaaaacccagacagtacaatctgccgcggatatccgtaaagtgttcgttgatgcgggcgtcaagggcgaagattacgatgcggcatggaacagcttcgtggtgaaatcactggttgcgcaacaggagaaagccgcggctgacctgcaactgcagggcgttccggcgatgttcgtcaatggcaaataccagattaacccacaaggcatggatacgagcagcatggatgtttttgttcagcagtatgctgatactgtgaaatatttggttgataaaaaataaaaagaacgccggtcactgaccggcgtttttataagatgttttaatctcttctatctgtatatctttcttatcccacagcgtattaagccaacgttgaaaacggcgtttgaatgttttgtcgttcacgtaatcgccgtgcagttcttcatttatgggttccagttgcacccgaacaacaatacgcgtcagcctaccgcttagcatatcgtagaaagggtgacgatcgttgtttgggtaacacaacgtaatattaagcagcttatcgaactgtgagcctaaaacattaatcgccattgcaataccggctgcttttggcggcaacaaatgttgataaggtgaatgcgtttgctgacgtttctcatgcgtaaatcgcgagccttcaacaaagttaacgatagtggtgggataccgacgaaacttttcgcaagagcgacgagttgtttcaacatctttgccgcgtcgatcggggtgtcggagcaggtagctacgggagtagcgcttcataaacggcatatctaatgcccagcacgccaggccgatgaacggcacccaggccaattgctgtttaagaaagtacttattcattgggatatgcttgcggaacagaacgcaaagcacaacgatatcggcccagctgcgatgattacaaatcagtaaataccaatttttcttgctcagcccttctaacccttctacatcccattgcaagtgcggattaaggcgtaacagcgctgcaagaccagcacaccagcaatacatcatgaaattgcagaaaatggagaccttgcgccagataccgggaacaggcaaaagaagctttaccataccggcaatgatgatcggtactgagcaaacaatagtgaccaggatggtcaatacgatactcaatgggagcgtgatagccgcgagtattctcgtcataataaattattcaaaagttagccataaacggtgcgcgaaaagggcgcaaggggctgattctatcagaaaacgatgctaatgatggcgctgagtgaaatagaaacactcgtaacaactatccacattatgataacggcatgaatcagataatcagaaaaacgtgatgttaacaactcattgaaaataatgggtaattattaagacgagaaggctatcgcgctgattttaaagtaatggtaagaatttacacacaaagttatccacaggttattttgcgagcgatcctgaagatcgacaaaacttttccgcaaatgcggcgaaaaactcaagttttcctcctgtatgtggcatcctttaaccataatctgttaaacaggcacggacattatggttcagatcccagaaaacccacttattctcgtagatggctcatcctatctctatcgcgcctatcatgcgtttccgccgttaaccaacagcgcgggagaacctacgggcgcaatgtatggtgtcctcaacatgttgcgcagcctgatcatgcagtatcagccgacgcatgctgcggtggtgtttgacgccaaaggaaaaaccttccgtgatgagctctttgaacactacaaatcgcatcgtcctccaatgccggatgatcttcgtgcgcaaatagagccgttacatgccatggttaaagccatggggttacctctgctggcggtctctggcgtagaagcggatgacgttatcggtacactggcgcgagaagcggagaaggtggggcgtccggtattaatcagcaccggcgataaagatatggcacagttggtgacgccgaatattacgctgatcaacaccatgactaacaccatcctcggcccggatgaagtcgttaataagtacggcgtgccgcctgagctgattatcgactttctggcgctgatgggggactcctcggataatattccgggcgtaccaggcgtgggtgagaagacggcgcaagccttgcttcagggattgggcggcctggatacgctgtacgccgagccggaaaaaattgccggtctcactttccgcggcgccaaaacgatggccggtaaattagcgcagaataaagacgtagcgtacctgtcttataaactcgccaccattaaaacggatgttgagctggagctgacctgcgaacagcttgaagtgcagcagccgattgcggatgaactgctgggcctgtttaaaaaatatgagtttaagcgctggacggcggacgttgagtcaggcaagtggctacaggcaaagggcgcgaaaccggcggccaaaccgcaggaaacggtcgttattgatgaatcgcccagcgaaccggcagcggcgctctcttatgaaaattatgtcacgattctggacgacgttacgctggaaagctggattgaaaagctgaaaaaagcgccagtttttgctttcgacacggagaccgacagcctggataatatcgccgccaacctggtgggcctctcgtttgccatcgaacctggcgttgccgcgtatgtacctgtcgcgcatgattatctggacgctccggatcaaatctcccgccagcgtgctctggaactgctgaagccgctgctggaagatgaaaaagtgcgcaaagtggggcaaaacctcaagtacgatcgcggcgtcttgcaaaattacggtattgagctgcgcggtatcgccttcgataccatgcttgagtcttacattctgaacagcgtcgccggacgccatgatatggacagtttgtccgatcgttggctgaagcacaaaactatcacctttgaagacattgccggtaaaggtaaaaaccagctcacctttaaccagatcgcactggaggaagcggggcgctatgcggcagaagatgcggatgtcacgttacagttgcatctcaaaatgtggcctgagctccagcagcacaaaggcccgctgaatgttttcgaaaacatcgaaatgccgttggtgcctgtactgtcacgcgttgagcgcaatggcgtaaaaatcgatcctgccgtcctgcacaaacattcggaagaaatcacgctacgtctggcggaactggaaaagaaagcgcatgacattgcgggcgaggcgttcaacctgtcctcgacgaagcagttgcagaccatcctgtttgaaaagcagggtattaagccgctgaagaaaacgcctggcggcgcgccgtcaacgtcggaagaggtgctggaagagctggcgctggactatccgctgccgaaagtgattctggagtatcgtggtctggcgaagctaaaatccacctataccgataagctgccgctgatgattaacccgaaaaccgggcgcgtccatacgtcctatcatcaggcggtaacggcgacgggacgtttatcgtccaccgatccgaacctgcaaaatattccggtgcgcaatgaagaaggccgccgcattcgtcaggcatttattgcgcctgaggattatctcatcgtgtctgcggactattcacagattgagctgcgtattatggcgcatctttcccgtgataaaggactgctcacggcgttcgccgaagggaaggatattcaccgcgcaacggcggcggaagtctttggcttgccgctggatagcgtgaccggggaacagcgccgaagtgcgaaagccattaactttggcctgatttacgggatgagcgccttcggtctttctcgccagcttaatattccgcgtaaagaggcgcagaagtatatggatctctacttcgaacgctatcctggcgtgctggaatatatggagcgcacccgcgctcaggcaaaagaacaaggctatgtggaaactctggaggggcgccgcctttacctgccggatattaaatccagcaacgcggcgcggcgcgcgggggcggaacgcgcggcgatcaatgctcccatgcaaggaacggctgccgatatcatcaagcgcgccatgattgccgtcgatgcctggctacaggccgagcagccacgcgtgcggatgattatgcaggtacacgatgaattagtgttcgaggtgcataaagacgacttagatgcggtagcaaaacgtatccatcagttgatggaaaactgcacgcgtattgatgtgccgttgctggtggaagtcggtagcggggaaaattgggatcaagcgcactaagcatttaaggaataacgcgcttttttcgtaattaagcaacataagcacgggggttttgtgatgggtattagaattccctatgtaaagaatgaaaaaaaattacgaaaaggtctttctgtgttgctcaaaaaagagtaaagttattcacgtagggtacagaggtaagatgttctatctttcagaccttttacttcacgtaatcggatttggctgaatattttagccgccccagtcagtttatgactggggcgttttttattgtgcgcaagaaaagtttcgctcacaccgtaggccggataagacgcgcagcggcgccatccggcatagcgggtgattattccccgtcctgaatctcttcgaccggtgccagttcactaaaccagctatccagcttctgacgtaacttatccacgccctgctttttcagcgaggaaaacgcttctacctgcacatcgccattaaaagccagcacggcttcacgtaccatattcaactgcgccttgcgcgcgccgctggccagtttgtccgctttggtcagcagaaccagaacctggatattgctctctacagcccactggatcatctgttggtcgaggtctttcaacggatggcggatatccattaaaacgactaagccctgtaggctttgacgtttctccagatattcccccagcgcgcgttgccacttgcgtttcatctcttccgggacttccgcgtagccatagcccggcaggtcgaccaaccgtttgccatctacgacttcaaacaggttaatcaattgggtacggcccggcgttttagaggtgcgcgccaggcttttttggttggtcaacgtgttcagggcgctggatttgcctgcattggaacggccagcaaaagccacttcaattccgcaatcggaaggtaaatggcgaatatcaggcgcactcatcacaaaatgcgtctgttgataattcaggttagtcaaagcggtcgtctccgtcagtcaaagcattgtggcgattatacctgaacgccagcaaaagacggatttttcggcgcatcggtgctgtaagtaaaagccatacgctttgtgagacattgaccattgcacttatgcgacatgacagagtcgttgtcaggctcaaagccagttaatatagttaaatcatgaatttatagaaaggtaattgtctgaaaaaaagggatttgccgtgtcggtatcttgtgagtttaccccaaaagagtaaagtaatgcacatagcgaggacgctaacaggatcaacgactcaggatgagggtcaggagcgccaggaggcgaagacacaggattgtcaggaagacaaacgtccggagacgttagtaaaaggaaatggaaacaacatggaatgttccaggctaagggaaaaacagggcgtgttgatagccaacagggatggtggaacccgttaagggtcgtgagtcaagaaaaaaggcggcagattactctgtcgccttttttctttgcttgctttctgctagattccgcctcaattctatactgaataaaacggcttaaagatctgacatcatgaaaaaaccaacctctgcaccgcgcagtaaagcctttggcaaacagcgtcgtaaaacgcgtgaagagttaaaccaggaggcgcgcgaccgtaaacgcctgaaaaaacatcgcggtcatgcgccgggaagtcgcgcggcgggcggcaattccgcttcgggcggcggcaatcagaatcaacaaaaagatccacgtattggcagtaaaacacctgttccattgggcgtgactgaaaaagtgacccaacagcataaaccgaaaagtgagaaacctatgctttcaccgcaggcggagttggatttactggaaacggatgagcgcctggatgcgctgttagaacgtctggaagcgggcgaaaccctgagtgcggaagatcaagcctgggtagatgccaaactggatcgtattgatgaactgatgcagaagcttggtctgtcttacgatgacgacgaagaagacgacgaagaggacgagaagcaggaagatatgatgcgcctgctaagaggcggcaactaacgggtttacaccgtgggcttgcccgtcctgcttataacccttccggttatatgttatctggtgtggttattcgttaaactacagcgattgtcgcggcgacagaaatggctgcgcagccggcttgccgcccgtcatggcgtgaagccggtacgccgtacccgccagagacgccatcggaaggagtgagcatgtctgaacagcaaatagactgggatctggccctgatccagaaatataactattccgggccacgatatacctcgtacccaaccgcgctggagttttctgaagacttcgaggacgccgcattcttgcaggctgtggcgcgttatcctgaacgtccgctctcgctgtatgtgcatatcccgttttgtcacaagttgtgttatttctgcggctgcaacaagattgtcacccgccaacagcataaagctgaccagtatcttgacgcgcttgagcaggaaattcgtcatcgcgcgccgctgtttgcagaccgtcatgtcagccagcttcactggggcggcggtacgcctacttacctgaataaagcgcaaatcagccgcttaatgacgctgttgcgtgaaaatttccactttaataccgacgcggaaatctcgatcgaagtcgatccccgtgaaattgagctggatgtgctcgatcatttacgtgcggaaggttttaaccgcctgagtatgggcgtgcaggactttaataaagaggtgcagcgcctggttaaccgcgagcaggatgaagaattcatctttgcgctgcttaatcacgcccgcgatatcggctttacctcgaccaatatcgatttgatctacggtctaccgaaacagacgccagaaagcttcgctttcacgctgaagcgtgtgacggaactgaaccccgatcgtttgagcgtctttaactatgcgcatctgccaacgctttttgccgcccagcgtaaaattaaagatgctgatttacccagcgcgcagcagaaactggatattttgcaggagacgatcgtatcgcttacccaggctggttatcagtttatcgggatggaccattttgcccgtccggacgacgaactggccgtcgcgcagcgcgaaggcgtgttgcaccgtaattttcagggctatacgacccagggcgataccgatctgctggggatgggggtttctgctatcagcatgattggcgatggctacatgcagaaccagaaagagctgaagcgttattaccagcaagtggatgagcggggcaatgcgctatggcgtggtattacgctgacccgtgatgattgcattcgtcgcgatgttatcaaggcgctgatttgtaacttccgcctggattttaacgctgtcgaacagcagtggggtttgcatttcgctgagtattttgccgaagatttgcagttactgtcgccgctggcgaaagatgggctggtggatattagcgagaagggaattcaggtgacggcgaaaggtcgtttgctgatccgcaatatctgcatgtgctttgacgcgtatctgcgccagaaagcgcggatgcagcagttctcgcgcgtcatttagccgggttgcccggtggcgctgcgcttaccaggcctacacgttgcgacaacctgtaggccggataagcattagcgccatccggcacattgtcagctgaacagtcccaccagcgcggcacacaacacggcggctagcgcagtttgtggcgtgtggctgtcgaccgctccactcgataccagattaataatagattctaacataatgaatccccccgtttgccgggcatgatcatactgaactcatcggaacagtaaagcgcaaaatagcagcgttttgcgctcaattattaatctttacactcgcgggtaatgtttactccattcccagctctttcaacttccgcgttagggtgtttcgcccccaaccgagcagcctggcggcttcctgtttatgaccctgcgtatggcgtaatgccgtggtcagtagcgttctctccagttctggctgcgcttcagaaagcaggttttgatgaccggatcgcaaggcgcggtccgcccattgtgccagtaatgtagcccagctatccggcggcaggtgggacgggctatccggcgtcgaggcttcaaacagttcgcccggtaaatcctggatcaatacctcctgtccggcggccatgacggtgagccagcggcaggtattttctaactgacgcacgttaccaggccatgccaggcgcgttaacgccgtttcggtttccggatgtaataatttggcttccacgcctaattcacgggcggcgacctgcaaaaaatggcgcgccaggcgcggaatatcctcacggcgttcacgcaacggcggaagatggatacgaatcacgttcaggcggtggaacaggtcttcgcggaatttcccttcctgaacgcgtcgttcgaggttctggtgggtggcggcgataatgcgcacatcgacttttaccggcgcgtacccgcccacgcggtagaactgtccgtcagccagcacgcgtaacagacgagtctggacatccagcggcatatcgccaatttcgtccagaaacagcgtgccgccgtcagcctgctcgaaacggccctgccggatggtattcgccccggtaaaagcgcctttctcatggccaaacagttcggattcaatcaaatctttcgggatggccgccatattgagtgcgataaacggcgctttggcgcgtgggctatggcggtgaagcgcatgggcgaccagttctttaccggtccctgattcgccgttaatcagcacgctaatcgaagaacgcgacagccgaccaataatgcgaaacacatcctgcatggcgggcgcttcgcctatcatgtctgttgtcgggccgttaacctcgatattacgcggctgttgctgctcctgatagtggctaatcgcgcgctcgaccagagcgacggcttcatcaatatcaaacggtttaggcagataatcaaacgccccctgctgataggcgctcacggcggcatctaaatcggaatgcgcggtcataatgatgaccggaagcatcgggtgacgctgtttaatctgctttaatagcgccagcccgtccattcccggcattcggatatccgacagcaagacgtccggcgttttactggccagcgcagccagtacttcattaccattctcaaaggtggtacaggtcaaccctgccccggcgagagcacgctcaagcacccaacggatggaactatcatcatcgacgacccagactattcctcgttgcataaacacctctatttccgaatcggcaggtaaaccgaaaactcggtatgccccggccaactggtaaattcaattttgccggcgtgttgatcgataagattgcgggcgatagataacccaagcccggtgccgccttcgcgaccgctgaccatcgggtagaacagcgtatcctgtaaatggggaggaatgcccggcccattgtcttcaacgtctatacgcgccgccaggcgatagcgttcgccatgcagcgttaactggaaggcggtacgggtacgcagcgtaatttcgccgccttccggccccagcgcctgcaaggcattgcggacaatattcagcagtacttgctcaatttgttccgggtcgtgcggcagttctggcaaactggggtcataatcgcggataagccggacattatccggcagttccatcgacaccagcgccaccacgcgctccgcgactttatgtatgctctcggtaatgtgcattcccgggtgctgcggccccagcaaacgatcgacaaggttgcgtagcctgtcggcctgttcaatgatgactttggtatattccgttagcgccgggtcgggcagcgccttgctgagtagctgcgccgcgccgcgcaggccgccgagcggatttttgatttcgtgcgccagaccgcgcaccagatcgcgggcggcgatttgctgcgcgtgctgcaactgctcctgactcagacgacgctggttatccatcggcgccatttcgagcagtataaaatcgtcgggcagacgttgggcggtcaaagagagaatatgcgagcgactatcaatcaccagcgtcacttcgttatcggtaaagccttgccctgccgctaaactttcgcgcatcaggtcaatgtttaacgaaaaatagctcaacagttcaggtaacggcgtcccgaacagtttgcgtgagctttgcgcgagcaactgctgcgcggcaggattggcgtaatggattgccagcgcgtcgtcgaccaccagcacgctgttgattaacgaattgaggatctgcccagcatcgggctgtatgccgcttgccattcagcagtctcctggaaaaggttgcaccattttagtgcattatagctttttaccactaaaaagcgcgtgagatcagattgttggtggagaaaaaagcccatcctgggatgggctgaaagtttccacggcaactcaaaaactcctgacgcctttcacgctgctgctgcgttggctgccttcgcttaccccagtcacatcgctatctatgctcctggggatgtgctcagttgctgccttgcagcaacgcgaaatttgtcggatttttaatatacgattaaacgctgtagtacagctcaaactctaccgggtgcggggtcatacgcacgcggtcatcttcttcgcgacgcagcgcaatatacgcatcgatcgcttcatcagtgaacacgccgcctgctttcaggaactcgcggtccaggtccagcgcgttcagcgcttcttccagagaacccgctacctgtgggatctctttcgcttcttccggcggcaggtcatacaggtttttgtccatggcttcgcccgggtgaatcttattcttaatcccgtccagaccggccatcagcagggcggcaaagcacagatacgggttagccgccgggtccgggaagcgaacttcgatacggcgcgctttcggagacgccaccaccggaatacggatggaggcggaacggttacgggcggagtaggccagcatcaccggcgcttcgtaacccgggaccagacgcttgtaggagttggtggtcgggttcgccagggcgttgatggctttggcgtgtttgatgacgccgccgatgtagtacagcgcttgttcagacaggccggcatatttgtcgccagagaacaggttggtgccgttcttcgccagagacatgtggcagtgcataccggaaccgttatcgccgaacatcggttttggcataaaggtcgcggtcttaccgaagcggtgagccacgttatgcacgacatatttgtaaatctgaatttcgtcggcttttttggtcatggtgttaaagcgggtcgccacttcgttctgacctgcggtcgctacttcgtggtggtgcgcttcaacgaccaggcccatctgctccatgaccagacacatttcagaacggatatcctgcgcggagtcaactggcggaaccgggaaataaccgcctttcacgcccggacgatggcctttgttgccgccttcgtacttggtagaggagttccaggcgccttcaatatcgtcaatcgccacatgtgagccggagatagatgcgccgaagcggatgtcgtcgaacaggaagaattcaggttccggcccaaacaggacggtatcggcgataccggtcgcgcgcaggtagtcttccgcacgttttgcgatggaacgtgggtcacggtcataaccttgcagagtgccaggctccaggatgtcacaacggataatcagggtggagtccgcgaagaacgggtcgataaccgcagtggacgcatcgggcatcagcaccatgtcggattcgttaatgcctttccagccgccgatagaggagccgtcaaacattttgccttcttcaaagaattcggcatttacctgatgagcaggaatcgtgacgtgctgttctttgcctttggtatcggtgaagcgcagatcgacaaacttcacttcgtgctcgttcagcatcgtcaaaacgtgttcagcggacatacttgtactctcccggattggtcatggtcggtcgtcgtggtaacgagatcttcaattctgctggccgtgtcgccgtaaaaatataaagcgaaatctgtgccaactttcacattgcccccaaaaggcgttatcatgcgcaccatcgtgcaaaagggctgcaccacggtgactatgttgcaccaaaatagtgctttaatgtgaacattaagcaccacattggtgcaacagaacgcaagccacccttttaacgctccgtgaaagcgatcacaaagagactctgcaatacttgtttgcggaggatgtttgtgatcctgttttgtagtgcgattaatccgtgtacaataacgcgctatttctaatgcctgaggcaaagttgtgatcgaaaatttgcgtaacatcgccatcatcgcgcacgttgaccatggtaaaactaccctggttgataagctgctccagcaatccggtacgttcgacgcgcgtgccgaaactcaagagcgagtgatggactccaacgatttggagaaagagcgtggtattactatcctcgctaaaaacaccgctattaaatggaatgattaccgtatcaacatcgttgatactcccgggcacgctgacttcggtggtgaagtagagcgcgtcatgtccatggttgactctgtgctgctggtggttgacgcatttgacggcccgatgccgcaaacgcgcttcgtgaccaaaaaagcctttgctcatggcctgaaacccattgtggttatcaacaaagttgaccgtcctggcgcgcgccctgactgggttgttgaccaggtattcgacctgtttgttaacctcgacgcgaccgacgaacagctggacttcccgatcatctacgcttcggcgctgaacggtatcgcgggtctggaccacgaagatatggcggaagacatgaccccgctatatcaggcgattgttgatcatgttccggcgccggacgttgacctcgatggtccgttgcagatgcagatctcccagctggactacaacaactatgttggcgttatcggcattggccgtatcaaacgcggcaaagtgaagccgaaccagcaggtcactatcatcgatagtgaagggaaaacccgtaacgcgaaagtaggtaaagtgctgacgcatctgggtctggagcgtatcgacagcaatatcgccgaagcgggcgatatcattgcgatcaccggtctgggcgagctgaacatttccgacaccatctgcgacccgcagaacgttgaagcgctgccggcgctgtccgttgatgagccgaccgtgtctatgttcttctgcgttaacacctcgccgttctgcggtaaagaaggtaagtttgtgacttctcgtcagattcttgaccgtctgaacaaagagctggtgcataacgtggcgctgcgcgttgaagaaaccgaagatgcggatgcgttccgtgtatccggtcgtggcgaactgcacctgtccgtgctgattgaaaatatgcgtcgtgaaggtttcgaactggcggtttcccgtccgaaagttatcttccgtgaaatcgacggtcgtaaacaagagccgtacgaaaacgtgacgctggacgtcgaagagcagcaccaggggtctgtcatgcaggcgctgggcgagcgtaaaggcgacctgaaaaacatgaatccggacggtaaaggccgcgtacgtctcgactacgtgatcccaagccgtgggctgattggtttccgttcagaattcatgaccatgacttccggtacgggtctgctgtactccaccttcagccattacgacgatattcgtccgggtgaagtgggccagcgtcagaacggcgtactgatctccaacggtcagggtaaagcggtggcgtttgcgctgttcggtttgcaggatcgcggtaagctgttcctgggtcacggcgcggaagtttatgaaggccagattattggtattcacagtcgctccaacgacctgacggtaaactgcctgaccggtaagaaactgaccaacatgcgtgcgtccggtacggatgaagcggtgattctggttccgccaattaaaatgagccttgagcaagcgctggagttcattgatgacgacgaactggtagaagtcaccccaacctctatccgtatccgtaaacgtcacctgacggaaaacgatcgccgccgtgcgaaccgtggtcagaaagaagagtaattaacgctcttacggataaaaaccctgccgaaatgaaagctcggcggggtttttttattcacgttgagaaagggataaggttgccaaaaaatcagcaatcgctggcgtattatgccgaccaatgacgctatccgcatacacctttgcccgagcgctggcattccccatcgcgacgcccaatccggctaaacgtagcatttccgcatcgttatcattatcgccaaacgccatcacttcgcgcattgcgatatgctgttgctgtgcatatctggcgaggctttgtcctttgctacaccccttctggagaatatccagttgatgatgccaggaccaggtacagcttagatgtaattcatgctgtataaactcagcaatattttgtagttgttttatgtgccgatgaacgatgctgatttgccagatattctccctactgcttagctcatcagcctgaaagattattttatcatcagcacgaattgtcggtttaagcggatatacccgcgccagtattttttccgtttgtaagtgcgtcagcggcagcgggtgaaggatctgctgttgagccggttgataaatatagcttccgttacaacagatcatcggttcggtgagcgccagcgtttgataatacgcataggcttcacgatgagagcggccggtgacaagcattattcggcagcccatgtcctgcatctgacggatggcggttagcgactctggcagaatttgtttattacggtttagcagcgttccatcaagatcaaaagcgattaaacgatatcgcatgagcgtccgatcctaaaacagcgtgaggcatccaggtgattcagcaatggaatatcgagacggtgctgataagcgagaaaacagtggcattgctttgcctggcaggcgggagaattgagccgttgttgatataaattacccattttaattttgctgatatgacaagcaaaaagatcgccttctgcattcataaaaatactttttcttcctgcggtacagatatccagctgcgctggccactgctgcgtttcaatcacatacagcggatcgagttcgccgaaggcgatggtttcctcaacggtatgccgggtattggcacactcgttggcgttaaaccaaaaataattctggtcaggcaactgctggcggagccaacgaaactggtcgatatctttcatactggcgacagcccccgcgcaccaggttattccggcggcagagagcgctaaacactgctggagaaagcgctcagcggtaatttgtgagggatgaaaagaacaccataaccgaagctttgagatatctccgccgccagcacgaaatgattccagcaatgacattaacgaaaaagaggcgttagtttgtatgccgaccgcctgaacatgaggatagcggctaatttctgccagcgccgccatgtaataacgcaagcgtagcgcctcgccataaggcgtaatcatcacattcaacggcgtacctaaaagaggcaaatggtcaaccatgcgccatagcgcggcttcgtcgcgttttttatcgttacgggcgtgtttatggaacgggcaatagccgcaatgataattacacgatttaagatagccgcgataaaacagcgtgtgaatatcgcgcagggcgggggcgctcatctctgccgattctcccgtagcatcacctcaggcgaaacgaacacaggagcaaggcaatcggataatgccataccggtctccgttagccggaggcgactgccattctgatagcagtaaccctgccgtatgaagcgttcaaggtcggggaaatcccttagcgcatcgctggcaaaatattgctgataatcgctaagagaaagtccctgccagaaaaatagatttttaatgataaagcggcgtttcatttcatcagggggaagcagataaccgtgattaatgacggttttatccgggctgtcgataaacgcctgaatgatttttcgtgatgtttgcaggttcgacgaccacggtgaacagtaatgcagattgccaagataacttctgccgcccgcgccgagcgccagtgagttttcaaatccgcagctttccgccgcggcggatggcgctggattaaggacgaaacggcgcatggacgtttgggtgtagcccgcgttgcgtaaaagatcgcgggctaaaacgtagtagctatgcatattttcctggcgaggcatattataaagcggataaagaaacagctcttccggttgataaacgagcgcctgatgtaatgattccgtcaggcttgcgtgagtctgtccgggaatgccataaataatatcaatattgagtgatggaaaatgacccgcctttagccattccagcgcctggtgcgcgctggcggcattgtggcggcggtgcagcgtatgtaactcgctatcatgaaaactttgtacgccaatactgacgcgattaacggaaaaggcgtttaatagcgctactttttctgctgtggtatccgtaggggaagtttcaatcgttttataaatattccagtcaacattgagcacatcaaagacggaaaaaaataacttctctaattgcgcaatatttaatagcagaggtgtgccgccgcctacggtaaagcttgcccagtgggcgggcgccagcgccatttgtcggccctgggtaataatcgcgtcgatatagctatcaatgaacgtattatctgcgccagtgcaggtaaataaattacagaacccgcagcgactttgacaaaagggcatatgaacatacagatgtgtgtcgtgctcgtaaatgcgcggttttacttcgctaaagctgacgttctccagctcccgataagccgtcttatgcggataactgtacatatactgacgataaatatcattgttattcatattaatgattacagctcagcaagaaatgcatatagggaacggtattaacgatcggatgattaaaactatggaaatatttcccgtcttcgccatagcaggtaccgtgatcggaacagacaataacgaacgtttcgccgccagtttggcggaaaatgttcagtaatccgtcgatgcgggcgtcgatatagcgtagcgcggcggcatgggtctcaacggtatcgccaggggccgcgccctcaacgtaaaaatggttagggtaatgaatcgtgtcgatattgatatacatcatgaccggttggctgccagcacgctcggccatgattttctggatataatggatctggttatccatactctctttaaccgtacaggcaaagcgtggatgccagtaactctctttaaacatcgacgggaacacttttcccatgccggagcggttattaaagaaagagacgccgccaatacagatggtctggtagcctttattttccagactttttatccatgttgcgtcatcaaaggcaaatgcatttttcgggcctttacgaccaagtccgatatcttttgggaaaaacagcatggtctgattaacggtatcatcaataggttttggcataaaacctgaaaacatggcgtgatgcgaaggccaggtaaaattaccggccgcttcgcatttcgtccattgtccataatgattaaggttgggcgtatttccggcggtttgttcctgaagcgcaatgtcgtagcgtaacgagtccagcacaataaaaagaatatgagcgttattactaattagcgcattcatatcgaattcgccatcgcctgtgtcaatcgacgcgtgcagcgagacggggacttcatccattgaattatacattttgcttcctcatggcccggatttgcgcctgataaattagattattctgctgcgcatcctgataaatcaaatcaccctggccattaatttcaataatatacggcgtcaggctggtggtaagtaaaacatcaatacccgctaagcgaatgccagggaaaagtcgcatggcattttgacagagcgtatcgatctcagtcacttttgcggcagataactccagactttcgaagcagtaagcctggttttgcagatgtaagttagtaatgggctgcgaggaggttctgaccactcgccagataatttcgccatccaggcagacgatgcgtaaatcataggttttatgctttacgctggctttgggcagccactgttcgacgaggttttcctgctgaagaacgccattaataatgagctggatatcttctttctgacgatactgttggatttttttgctgttaaatagctgttgtcctgatatgacaatcgcgctgtaaagcacctgctttatgccatcagggtggcggcgcaaagcgataacgcccgccgcgccagaacccagcgagggcttaatgaacacgctggcgacccttttttcctccatgatggcggtgagctgtgcaaaactttttacgtcttccgctaccaacggcggcgtggggatgccgtgttccagtaagcgccgcttgcagcgttttttatccaacaggtgaatgaggcccgccggatggttaagccaggtgacgccaggacgcgccgccatgttctgcaaaaaatggatatagtccagaccgatcgcgtttattttgcggatgtctgtttcactgtgtactggcgggtcgattttaacgatgccagaggtcagcgaagcgtccagcgcttgcggatgagtcagcgccgtgacgggttccccaagtacggcggcagcctgcataaaataatgcgtgcgcttgctctgatgggggccaatgagcgtaatcacaataaatccctttatcgttgagtaggggaatgtgcacattcccctactcaatcactcggtgtacatcgcattcatataaatatcgccatcgtaatcatcaggctccagagcttctgaaagattcaggtttatcggcagtgtggcttttagcttttcctgcatctccggcgtcaaatagtggtggtggagatcgagtgtttccagatgcgcaattcggtctttatgctccagcagcgcctctgcgccgttgtccgttaaggtaccgcatgagagttccagcacgttaagctgcggcaggatattactttccagcacccggcgggcgatatcatcctgctcttcgctgttcatcaaccccagatgggtgagctgagggaaaagatctttcgatgccagcgccatcacgtcatccagcgaaccgtcaaaaccgtatccctctacgcccaggaagagcttcagcgtttttaatgcagggagctgcgcattttgtagttcggcaagtacgttagaagggatgccgccggaaatgatttccaggtgctccagtttctcatgatgtatagcgcccagtcgcagatccgacgcgcctttaataatcagttctttcagattgggtaacgccgcatagagcctggaatagtcaccttgtttaatccaggagatctcgcagtcttcgctctccatatcaccgataaacagtgattccaggtgagtaaagcgggaggcgttctccacaatcatatcaataataggctggcaggtttcgtcttcccaacaatcaccccagttaccaatggtcagtgagcgaagctttggcagatcttcatcggttaaaatcaaattaatgagctgttcctgggttaattcattgtcccaatcaatattaaatcgcttattcatttgtttcccttctctataagcatgaatatggtaaaacgctttgcgaatattatcatggcgcttaggggcgggatatcgggagtctgattcaggatgaatgagcgggcagaacaactacccgctgtgatgctgattcgtaaaatagaggcaataatatcagaagaaatacttcgccccgatacgaatctggttttgctctctatggtaggggcccacgttacgatctaaccagcgtaattcaaagtagggcaaccagtgttcattgatacgataacggaaggtattagtgatttcccaatgatgcttcgtaccattactactattaaaatcattaacgttataaaaatagtgtggttcaaaggtataagaaaatttatcggtaatgataaaattccaatagttaccgatttcatagctgtcattattatccagttcgccattcaaatcggttgaactataattattgtgattatatcggttacgtaccgtaagattaaaccacggggtaaatttatagttaacatccagatagacggcgccgccggaaccaatgcttttgtcgtttattaaccccccaggctggatggttaatttatctgtaggtttaaataatggataccagccctcaatctcattataaccgtgctttaattcatcatcacgctgtagcgtataggtattggtcaacataattccggcccccatatcggagttatagccgacgcgcagcataaactccatttggtcagacgccaggttataggcctcacggttttctacataagcgccagcaaaaacagaggtggatattactgaagttaatatcactagagtattcagagatttcataataaatccatttttcaaatatagggaagccgccatccatcgggatggataaagcggcaagcgtcgtttaattatttacagtagaaatactttgtttattattagtcgcgacaatttgattacctgttttctttcgttgggcaatttcctcgataataaaagcgaaacgttgttcattgagcttataaaaaaagcccatcgttagtgctgcgataatggcaagaccgcaaggccataaaaaaatgagctgacgcaaaccaagcaacgtggtgtcactttgagctatgttggggatataaccgatttgcgtcagcataatacctggcaaaaagccagcaagcgcagcggaaattttgcgggaaaaggtataacccgtatacaccgagccttcagcgcgaatacccgttttccattcaccgtagtcaaccgtatccggaaccagcgcccagttcaggctgttgacgaaagcggtaccgaagaaggcgatacaagagaaaataacaaacaggaatgacgttccaccccagataaaattcaggatatcgccaacggcccacaatatcagaccaccaagataaacctgttttttcccgaagcgttttaccgcagcaggtactaataaaacaccaatcaggatacagcccatgctgaaaaaacccatccatgacaacaaatgaatatcgttcagcacgtactgagtgtaataaacctgaatggccagcttgatattaaaggcggccagcgtgcacaaattggcaacgcagagcaccagcagcggcggattacgaaaaatcgcgcagaaggacttcaatatgctgggtttatgcgtgtcaggtacggtttcgatataccgttcttttaccccgctaaagcaccaccacatgctgaacagcccgcagaccgaaaagatgactgctgcaatcagataacccagcgaaggggaacgggtaaacagcgcctgaatgggcataaaacctacggtacaaagaagaaggccaatggtagcgccgccttgtcgccatgcggcgagctgggcgcgctcatgcggatttttggtaatagcgggtaccatcgcgccgtatgagcagttcatcaggctgtagaacagaccgaacaacataaacagcaccgtcgcgaaggctgttttaacgggtaaagtaaagtgagtggcaaagaattgcgcagtagcaaccagagcgactggaaatgacgcatacagaataaaaggccgaaactttccttttgcgccaatattacggcgtgagtccagcaatacgccggtgagcatatcggtaaaagcggtgaagaatttcgccaccagaaagataattccaccgtaatatgcaggcatcccgagttcatcggtataaaacttcagtagatacagcgtaccgatacacagcatcagatttgagccgaaatcgcccacgccataggcgcatttttcccgcaggctcaactttagcgttagcggatcatgattagacataatcgcctctcaaaacgccccgcagggcgttatattttattgttgttaaaccgtatgtttccgggcctcaatctcttccacaattcgcacgtacatcttctcgttgaggttgtagaaacagcccatcgcaataatggtgatgaccgccagcacgcaaggataaataaagatcaactggcgtaggccttcgacggtgcctgccgattgcaccacattcgggatataaccgatttgcgttagcatccagccggggaagaaccctgccagcgcctgggagaccttacggaagaacgtgaagccggtgtaaaccgtcccttccgagcggacgccggtgcgccattcaccgtactccaccgtgtcggaaaccagcgcccagttcaggctgttgacgaaggcggaaccgaagaacgccaggcaggagaaggcgacaaaactgaccgagccgccgccaaagaagtagttgagcagatcgcctgccacccatattaacagcccgccgatatagactttcttcttgccaaaacgccttacagcgccgggcatcaaaaaaacgccgataaaaatacagcccatgctaaagaagcccatccaggagaggaggatcgggtcgttaagaacgtactgggtgtaataaacctgaatcgccagtttgacgttgaaggcgccaagagtacaaaggttggcgatacacagaataaacagcggacggttaccggcgatggcgcggaacgactgcaataatccaggcttttgcgcgctatcgacaggtttcacttcgacgtagcgctctttaacgccggcgtagcacagccacataaatagcaggccaaacaatgaaaatagcgtggcggcgaaaatatagctgagttgggcattgccttcgatcaggttcatgaccggcacaaagccaacggtacacagcagcaggccgagagtggcgccgccctgacgccaggcggcaagcgaggcgcgttcatccgggttcttggtaatcgcgggtaccatcgcgccatacgagcagttcatcatgctgaaaaccagcccgtacagcataaacagcatcgttgcgacgacggtttttcccgtcacctcaaacggtgtgccgacaaagttagcaatcgccagtagcgttaccggaaatgccgcgtaaagcacgaacgggcggaatttgcccttcggaccaattttacgccgcgagtcgagcataatgccggtacccatatcggtaaatgcggtaaaaaatttggcgatcaggaaaatgatcccgccgtaagtccctggtaaacccagcacatcggtataaaatttgagtaaatagagggttccgatatctaacaggatattagaacctaaatcccccagtccataggcaagtttttctttaaacggcaagcgtagggttgccggattcgatgatgtttgactcattattcttctccatctgcccgcaggtttccctgcgggcgagccgtattagatattccgtaaagaagcaaaaagtgaagcccactcgctcttcgcgcgatagaagaccggcggcttgccaatgggcgcatccacggtaatttcaccgccgtggtgagcttcgccggtccagatattcacccagtgatcttccggcaggtacagcgtccagtcgcaacgcccctgctcgtgaaccggcgcgaccagcagatcctgaccgagcagatattgatatttcagggtgtaggttgcggcatcgttctcgtaatgcaggaatagcggacgcatgaccggcagaccggtagccgcgttttgcgccaccgcctgcttgagatacggtttcagcgtggtaaagacggtggtcatgcgggcaaagtgggcaatagtttccgcgtcgccgtcgaactgccagttatcgccggggcggttgccttcatgggtgcgcatcatcggcgtaaaggcgctgaaatcgcaccagcgcagcagcaactctttgctgcgtttcatgtcaaacagggtggtgtagccgccgatatcgctgtgatgcagaccatggccggtcattgccagcgacaatgccgcaggcacgacagaggccagaccatcatcaaggctccagtcaacgttctggtcacctgcccacatcatggtggaatatttctgactgccggtgtaacccgcacgcataaagaacaggatctcgccgagcttgccggtctcctgtagcgcttcgtagttacatttcgcccagagcgcaggccaggcgttatgcatgatctcggcgctgacgccgttgtgcagatacgtgtcggtcggcagatattcgccgaaatccgccatccagccgctgcagccgagcgcgatcatgctctttttgatgacgtctttgaaccagtcgtaagcttcaggattggtcagatcgaccacgccgccatagaattcgccaaactcgaccagatagtcgccgcccgtggcgtctttcgccagatagccgtgtttcgccgcctcggcgcagaggtctttatcactggcgacgtatgggttgatataagagaggaactggacgccttcttctttccactgtttgatacggctatccagctgtggatagttgtcgctattccacttccagttccacatcacgcgcttgccaaaggaggtcatgcggataccggaccagtcctgcgcccaaataccgttcacttttacgcctgcgttgcgcatggtatccagtttttgctggcaaacttccgtaccgccctgaatgcctagcgtgacgccgtcgtaaacccagtccggcagctccggctggcgacctaacagcgcagtcagtttttccagcagggcgatgtaggtgtcggcacactcaaaacgtagcgtagttttatcttcccacagcgccagttcgtgatactccggcgcgctgaagtcgaaattcatatagcagctattatcgacgtggcagtaatacttctgcgtgctgacaaaggtcggttgcgggaagaaggtccagtaatagtcgccgccggcgttctctttacagtctgcctgccaggtgacatagctggttttattacggccaacgccctgttcgctggtccacagcgggaacggcttgccgcgcaaatcgaaataagagaactgttcgccgcagccgtagatatggtcgtctggattagctgcgagacgtaaccagatacggttatggtgcaggtcgtcgttttgcagatccagctgcaggcgtcccgcttcatcggcggagatgcgaagggtggcgctaattgttgcgccacggctgaattgtaccagccagccgtcaggtagctcgctgacggtggcctccgttaatgcaatcttttcgttaagtttgtctttgatgctaaagttgccgcgaaacatgtcaatgtcggcaacgcccgcgccaatccacagacagggattttcggtgctgtggcgtaaaatcaggcgctgttgccagctaagcgcaaaaccatcctgtgatgttgtcagttcaaaatcggttgaccgttgtggtagagaattcattgtaatctccgtgaatgtagggtaattcggtaatccatttgggctagtcgcagccgatggaaaaatgcagttgatggatcgcttttggggcaagatgaatcagtgcgatcccggaattaaatgcatcgggcgggcagctcataggctctaccgcgagaccttttcggctgagtttttcgccggtatagatctgtaaccagggctgggtgctgcgtaaaaatgtggacatgttctgcgttgggctggtaagtctgacctcccactcagccggggtagtcgcggtcttaaccgcatgatcaaggcgcgtttcgccgagcaggcatgatgcggaaaaatccctgcctgcgggcaattcttcgcttgcaggcagtgttaatacacagctatcgatgctttgcagattgcaagtcaaataaggatgcgcgcccgcgccataaggggctgattcatcgccaatgttttgcgtacgaatcaatacgtgcagcccactggcggcatctaaccgataaatcacttccgatatcaacgcaaagggatagccgtaagagggcggcagaaaaatcgttagcgacgcttccgtcgccgactgataattaatctgccagtctcgccaggctaacagaccgtgaatggcggtctgcgaaaccgggtcgttaacggcaagctggaaaaccttgccgttataggagtagcagccatttgtcacgcgatttggccagggaatcaatactttccccagatgcgccatgggtatttcttccggtttatgcgggatgaccacatggcgtccatgatgggtcagttccgccagacctgcgccaaccgtgacgattttcgcctggtaatggcccgcattaagctgaatagtttttccaccgctgtgcatggctgccatcctcatgacctatttcgcgttgatatccaggagacccgccgcgaccgccggagccaggcccggcgccagtggcagacgaggaatgaccagacagtgcagcagatggtaaatatcttgcttgccgtcccacactttggtggtcactttgttatcggcgtccagctcttgccaccaggaaccattttcatagtccatcaggtacttaatgcagtagtcccaccatttctgataccactcttcatactggctatcgtccgtcagggtgtagagggcgtaggccgtacccatcgcttccacaatcggccagcgcacgcgttcacgtacgataggtttaccgtcccagtcgactgagtagacaaagccgtctgcgccatctggcgcccaggcgtcgcggatagtggcatggaacagacctttcgcatcctccagcagccaggcgggtggcgtttcgaagcgggcctccagcgcagcatggagatggagcatcagacggccccactcaatccagtgaccgggcgtaccgccgtaggcgcggaaacggtgggcaggattatctttgttatagtcgcggatagggttccactgtgaatcgaagtgttcattgacgcggtaatcaccgttgcgcgccacatcatgaataattaccgacgcgatacgcagcgcgcgatccagccattttttgtcatgggtaacgtcataaacaatcaggaacgcttcgacggcgtgcatattggcgttgccgccacggtagtcttccgtctggctgaaggcttcatcccaggactccaggcacatctgctcttcttcactccagaagtatttctcaatcacttctatggtgtaatccagcaatttcctggcttcaggatgcccggtcgtgacggcgctggccgcgcccagcaaggcgaagaagtgttgataaccctgtttagaggcatctaccacgccctgatcgttaacgcaggcataccagccgccgtattttttatcgcgcagcgcgccgttcatggctttgatgccgtgatcgaccagatcataagcgcccggtcggcccatcgacgccgccacggaataaacgtgcagcatacgcgccgtgatccaaagatgggtgcccatctcttctttgatttgccctttatttcccagccagccgaagcctgtcggcaccacggcgtttttaccgaaattaaagatgcggtcggtttcctgctccagccagcggttgtggctcaacgtgttaaaccatttcattctgtcatcctcgtattaacgacgttttgccatcatttcatcgacgatctcgcccagacgttgcaatttaggcgcggaaacatcacgtagcatcagctcggtatccggtaaaccaattactgatgaccagaccgcgcgtcccgccaggaacccggatgcgccagcttccatggcgaccctgactgcgcgagggaacagtttttcgtccacaccggaagagaggatgacccacggcatattgatatgcccattcaggcgttgtgaggcggtaagaagatcggaacgtgcgcctttgccgtagagcggcatttcaactttgtaaagatcggcgccgctgtcgcccagctctttggccgcatcgataatcgcctgctcgcgatcgaacttgtcgccgcagcgcggcggacgtacaaccggttcgataatgctcagcaaaccattggagtgacataattcattgaattctttgaccatattcagacgctgctgcgcgtcttcgtcgctgcgccacagcaccaacagttttaaggctttcgcgccgtcccgttttaccgcctgcgcattaatttttttatcaaggaccacgttatcaacgggaataccgttgcccgggatgaaatcatccgccgcgacgatcatggcgcagcttttagcgaccgcgttttgttctacggcctggcgataacagaactgctgatccagcagaacggcagaggcatacggggaaagaattttcgccgcattcactttgaaatccgtcagcacgctatcggcaacgggtgttttcgcaccagcagcagcaaacattaaacgcatcgcctcgcgctgatcgacagccagcatggcaaacccgccggacgctcgcgtaatgtctttgatggtgtagttgttcattcaattttcctttatacagtcgttacttttttacgttggcggtcagcccggcgctgatgcgcacctgttccaggatggcgctccagtcttcccgaccgcggcctgcggcccgcgccaggttataaacttcacgggaggcggcgccgagcggcatcggtacgtgcagttgattggcgacatccaacgcgatgccaagatctttgtgcgccagatcgatcatgaaggcgggagacagatctcctttcatcactttattcggccaggtggtggtgaaatgccctttgcctgcggcagtgccgctcatcacttttaaagccacgtcgaaggaaagccccagcgcttcacacagcacggcggcttcggcggagagcgcatttagcgcaatactcatgtagttgttgatcagttttacgcgaatacccattcccgggccgccggtgttgaccagctcattacccatcgccatcagaacaggggtagcacgctctacttgctccgccgtaccgcctgccagcagcaacaatgtgccggtaatcgcgttgtcggatgtccggcctatcggcacatccatcatgctgaaccctttgctctgcatgtcggcaatcagattatcggtttgcaacggatgaatagtggacatatcaatgaccagcgcttcacgggaaagagtttcacaaacgccttgctcgccaaacaaaacggaacgaaccagatcgccgttcgggagcatggtgataacaaattcagcgccgatggttgcctgagccgggctgcttgcaggttgcgcgcctttgtctaccagacgctgtacggcgtcgggattaacatcgaagacgctgagttgatggccctgctttagcagattgctcgccataggggagcccatctgtcccaacccgataaatgctataactgccatatcgttctcctgaacacggtggtgtcattttttgtcattaatgagcatttttctgtctgtttgtgatcgtatttgtaatttatagtcaaaaaattgacagccgtcactttttaaacatttcgtgaaattaaaatgagcacatcgaaaatgcttgaggaatgaccatggttcgtattgcttgtgtaggtattaccgtgatggatcgcatctattacgtggaaggattaccgacagaagggggtaaatatgtggcgaagcgctatacggaagtgggcggcgggcctgcggcgaccgctgccgtggctgcggcgaaattgggcgcacaggtggactttattggccgtgtgggcgatgacgacaccggaaacagcctgctggcggaactggaatccctgggggtaaatacccgctatacccgccgctacacgcaggccatgtcgtcgcagtcagcgattatggtggatgccaaaggagagcggattatcgttaattatcccagcccggatttattacctgacgccgactggcttaacgacatcgatttttcgcagtgggatgtggtgttggcggatgtgcgctggcatgacggcgcaaaacaggcgtttacgctggcgcgtcaggctggcgtcatgactgttcttgatggcgatattacgccgcaggatattagcgagctggtggcgttaagcgaccacgccgccttctccgagccagggctggcacgcctgacggggatgagcgaagccattgatgcgctaaaaaaagcacaaatgctcacaaatggacatgtctatgtcacgcgaggcagtgaaggctgcaactggttggaaaaagcggcggtacgccaccaaccgggttttaccgtggaggtggtggatactactggcgcgggcgatgtttttcatggcgcactggcatttggcctggcaagcggatacgccatcgaagaggctgtcagattcgccagcggcgttgccgcgctgaagtgtacgcgcccgggtggccgggcgggtatccctgattgtgagcaaacccgatctttcttgtcactttttgtataatatgagcagtaggaagcttttagaggaatgctcatgagtcttaccgaactgaccggtaatccgcgacacgatcggctgttaatgctaattgatgagcgcggctatatgaatatcgatgagttagccagtttgttggaggtctctacccagacggttcgccgcgatattcgtaaattaagcgagcaggggctgattacgcgtcatcacggcggcgctggcagagcgtccagtgtggtcaataccgcctttgagcagcgagaggtctcctggacgcaagagaaaaaagccattgcggaagccgtggctgactatattccggatggctccacgatatttatcacgattggaacgacggttgagcaggtggcgcgcgcgctgctcaaccataatcatctgcgcattatcaccaatagcctgcgcgtcgcgcacattctttataataaccctcgttttgaagtgatggtgcctggcggcacgctgcgcccgcataatagcggcattatcgggccatccgcggcggcgtttgtggcggggttccgggctgactatctcgtcaccagcgtaggcgcgatagagagcgatggcgcgttactggagtttgatgtcaacgaagccagcgtagtgaaaaccatgatggcccactcgcgacatattttgctggccgccgatcatacgaaataccatgcttctgcggcggttgagatcggcaatgtgtcacagattaccgctctgtttacggacgagtatcccggtccggcattacagaatttacttcaatcccagcaaatcgaagtggttcaggtgagtccttcgctggacgacgccgtttcagcgtgacaagcgcccttgcgccggagggtcgcgtcagcgctttatccggccaataaaacggcgctgtgatgcaggcgatattgaacatcgtctgcgtttctattgtctttttgttaattgatttataaagggatacatagtcaaacttctcctttcccgctacagttattcatccccggttagcaaggagaatgacatgctctacatctttgatttaggtaatgtgattgtcgacatcgactttaaccgcgtattaggtgtgtggagcgatctgagtcgagtaccgctggcttcgctgaagcaaaaatttacgatgggcgagacttttcaccaacatgaacgcggtgagataacggacgaagcgtttgctgaagctttctgtcatgaaatggcgttatcgctcagttatgaacaatttgcgcacggctggcaggcggtatttgtcggattacggcccgaggtgattgctatcatgcataaactgcgcgagcaggggcatcgcgtggtggtgctatccaatactaaccgactgcatacccacttctggccggaggaatacccggaggtgcgcgctgccgccgaccatatctatttatcgcaggatttgggaatgcgtaagccggaagcgcgtatttatcagcacgtcctgcagaaagaaggtttttccgctgccgatgcggtctttttcgacgacaatgccgataatatagaaggggccaaccagttggggatcaccagtattctggtgaaggataaagccaccatccctgactatttcgcgaagctgttatgctaaaaaccgttcaccaaaaagctggacgccatacgcgccctgttcgggcctggctcaagctattatggcagcgtatcgatgaggataatatgacgactctggcgggaaacctcgcctatgtctcattactctccttagtaccgcttattgccgtcgtttttgcccttttcgctgcttttccgatgttttctgatgtcagcattcagttacgccattttatttttgctaactttatgccagccaccggagacgtgattcagcgctatattgagcagtttgtcgctaattccaacaaaatgacggcggtgggcgcctgtggactgattgtgacggcattgctgttgatgtacgccattgatagcgccttaaacactatctggcgcagcaaacgcacacggccaaaagtgtactcttttgcggtgtactggatgatcctcacgctcggcccgcttctcgctggcgtcagcctggcgatcagctcctacctgctttctttacgctgggccagcgatctgaatacggtcatcgacaatgtattgcacatccttccgctgctgctctcgtggatctcattctggttactttacagtattgtcccaacgactcgcgtaccgaaccgtgacgcccttgtcggcgcgtttgtcgcagcgttgctgttcgaggccggaaagaaaggtttcgcgctttatatcaccatgttcccgtcatatcagctcatttatggcgtactggcagtgatccctatcctgtttgtctgggtatactggacctggtgtatagtcttgcttggcgcagaaataactgtcactctcggggaataccgaaaactcaaacaagccgcagaacaagaagaagctgaccaaccatgattgcattaattcaacgcgtaacccgtgccagcgtcaccgtggaggacgaggtgacgggtaaaatcggcccaggacttttggtgttattgggtgtcgaaaaagaagatgacgaacaaaaagcgaatcgtctgtgcgagcgcgtgctgggataccgtatcttcagcgatgctgacggcaagatgaatctgaatgtacaacaggctggcggcagcgtgctggtggtgtcgcagtttacgctggcggcagataccgagcgcggtatgcggccaagcttttccggcggggctgcgccggatcgcgcgcaggcgctttatgaatattttgtcgagcgctgccgccagcaggcgataaacacgcaaaccggacgcttcgctgccgatatgcaggttgagctggttaatgacggccccgtgacattctggctccaggtatgagtcagcttccggcgtggccgcggataacaagagagagtacggctatgtatcaccttcgagttccgcaaacagaagaagaattagaacgttactaccagtttcgctgggagatgctgcgtaaaccgctgcaccagccgaaagggtcggaacgggatggctgggatgcgttggcgcaccatcaaatggtggtggacgaagaaggaaatttagttgcagtgggccgcctttatatcaatgcagataacgaggcgtctatccgttttatggctgtacatccctcggtacaggataaagggctggggacattaatggcgatgaccctggagtctgttgcccgccaggaaggcgttaagcgcgtcacctgcagtgcgcgcgaagatgcggttgagttctttgccaaactcgggtttgtcaatcagggggagattactacgcccacaaccacgccaatccgccattttctgatgattaaaccggtagcatcgctggatgatatcctgcatcgcggcgactggtgcgggcagcttcagcaggcctggtatgagcacattccattgagtgaaaagatgggggtgcgcattcagcagtacaccgggcaaaaatttatcaccacgatgccggaaaccggtaatcaaaatccgcatcacacggtgtttgccggcagcctgttctccctggcgacgctgaccggatggggacttatctggctgatgctccgtgaacgccacctgggcgggacgattattcttgctgacgcccatattcgctacagtaaacccattagcggaaagccaaacgccgtggctgatttggggtcgctaagcggtgatttggacaggctggcgcggggtaaaaaagcgcgtgtccagttgcaggttgaactgttgggcggcgagaccgccggagcaattttcgaaggcatttatatcgtactacctgcgaaaccgttcggcccgtatgaagagggcgggaatgaggaggagtagctggacatatccaactactcgatgaaggcatctgctggtagtttgaagcgttgtgtaagcgctttaatatgattaaccgttagtgctctgcggccatttaagatgttgctgacgttcgatttagaaccaagttcgttggcaagatctgctgctttgagaccgtattgatccatgagcgttcgcaatactgaaacgccagggggcgttttctccaggtgttggttgagtgctttgaattccggcgcatgtttttcgtattcactgattcgggcacagagcaattcaaatagtgggttttcaagatcgtcgtggtcgaccagaaactccactagcgctagtgccctgcgatactcattgtcatttcggtcttcccccatcagtgggacggtttttaccgcatcgctgaaggtatcaacgatcttttttgcgctggttgcatccatctgacgatgagttctcattctttattaccccgatagtatgcggtcagtttgtcatattcggcatgggaaacgatatgtttcacaaatatcttatgtaacctgaaatctatgtaggaaatgagtctcaggctgttaccagaaacatcaatcacccaccatttatctctgtacttaaaattatccagtgaaggaatataccgcttcatctcttcaggctgagtgaatgtttttttctccagaacattcagcaactcagtgagagcaagctcatggtttggatacatgagcatcgcttcattgaacggttttcggctgataacatgcacaatgtagttccattacaaagttttcaacctgaaaacaatttagcgcaacgttatccagttttcaagttgaaaacaaaattgaattttaggtcattttgcctgttgatggacttacaacacgccaggccacatctcgcatggcgcttcgtgccgcctggctcacgcctccgagctggaaaaagccatggatgacaccgagatagcgctggcaagtacattccacaccctgttcctggaaccgttgatacagggcctcgccctcatcgcgcagtgggtcgaattcggcagtaatgatgtgcgtggatggcagtccggcgaagtcctcacgccagagcggactggcttcaggatgcagtggatcggttcgcggcatatacatctcgtagcctgaaagcagcgtgtcacgcgtgataatgtaatccagcccattacaggtgtagctcgcaaacctggcggttgcgtccagcatggggtagatcagaatcagctgtgcaggttgccattgacgggcggctttcaggcgtagcgcggtgaccagcgccagatgcccacccgcgctgtcaccagcaagcgtaatgttctcgcgatctatccccagtttctgggcatatttccagatagtattggctccggtttcggcatcgttatgtgcggccgggaaggtgtgatctggtgcaagtcggtactgtgccgcaatcacgcgacaacggctgtaaaaagctaactgccttaactggttatcgtgagtggcaaaaccgccgctgacaaagcagccaccatgataataaatgatgcagggtaatttccctgtggcattgagcggcgaaaccacgcgaaacgtcatggcatcgagttcaatatcttcaacctggacgcgggtttctgtttctcctgccagtgtcgtgctggcgatgtagcccgccctccggtcatcaatattctgttcgcgagaagaggggcggcccgcggcgataaacccagcgaccagttcggcaattcctttttccagtggcatataacgctcctttgactgtatgtatgtacagtttataacctggttcgttggggatggaaagtggtgaaacgaggggataatgattctggatagaggttcgcaaaaaatggaatgcggttggcgctgggtttttaatttttgtactgtgaaacgatgatgctatacgccattgacgtatagattattttcactactataagccaatggcgtatggaatatgcaatttatagaaacggaactctttactgaagatgttaaaaaactgctcgatgatgatgaataccataagcttcaggtttttatggctcagcatccagattgtggtgatgtcattcaggaaacgggcggcctgagaaaaatgcgctggggagcgcgaggcaaaggaaagcgtagtggcgtgcgaattatctattttcaccgtagtcaacggtatgagattcgcttgcttctgatttatcaaaaaggcattaaagatgatctcacgccgcaggaaaaagcggtgcttcgtatgctgaatgagaggtggtagatggataaagtgttatttgagcgattaactcaaagtatgtctcaaatgaatgaaatcattgaagggacccgtgaaccttctcgtacctttcatattgatgcaatgaagattaaagaaatacggcaggcatctgggttgtcgcaatctaagtttgcagagctgatttcggtcaacgtggatacgctgcgcaactgggagcaaggaagacgttcaccgacagggccagccaaagcgttacttcgcgccattgccaacgacccgagaaacgttatacaagcattgcgttattgagcaatgatccggctaacgtagattgctagccggtataccagagaacttattccccttcccccgggaacaggaacgggttgatggaactgcgggcgaagccctcctgttccatgcgcgcgtccagcaccagcgaggcgaggtcgtcggccactgcttctactttcgggtctttttcctgatagagaatcttcaggtaagtcccgcaatcgccgcagctttcggctttcaccgcagcctgctcattttccagcgaccagtagtgtaagtcgcggctctgttcgcagttactgcattttacgcgcacgacatgccattcggtttcgcacaggttacagtgcagataacgcagcccctgcgtggtgccgatctgcaccatgctggagaccggcatcgaaccgcacaccgggcaatactggcgcgcttcaccgtattccgcgcgggctttgcctggaatcaagctggccatttgcgcccagtaaagggagagcgcggcccagataaagggggctttatcgctgctgacggaggcaaaatccgaggcaaacagcgcgctggccatctgctccagctcctgctctgaggctttctccaggttctcgatcaccgccagcgcggggccgctcatctcgggttttagctcggcaattaacgaatgcagcagtttttgccagtgcttatcacgcggcagcacgtggatatccagcggcggcttgccctggtcgttcgcttctttaatacgtgcggtcagatccatctccagcggatggtcgtacagcaccacttcctgcgcgtgcgcgataagcgcggcaaagcgcaggtaatcgcccagcgggttattttcagccagctcgcgcagacgttcggcgcggcggttgtagacgtttttgagtcgggggaacaataacggcggaatcatatccgccgtacgtttctcgctcgaccccagctcatcttgcgggattatgcgaatactcattcagtttctttttccgttgtcttgcggacttctcggtaccagcgcgggtgatgtttcttcgcccacgaccgggttacccagccttccaccatcgcggtaatggtgcctttcacccaaagggcggcgtagatatgcaccatgataaccacaattaacgctactgcggcaaaagaatgcaacattaacgcgaatcggatcaccgggattgagaaagcaggcgcaaagtacggacgccagataattaccccgctcaccagcagcagcaccaggaagataatcgccgcccagaatacgcatttctgaccgaagttataacgcccggtgtcacccacttcctcgttgacgacgatcttacgaatattcttcgcccaaaagatatcatcccgattgattagattgtggtgccaataacggaaaaacatgatgatgaacgaggcaaacataaccacgcccacaaacgggtgcagaattcgcgccagttgcggggtgcccaggatatgcatcaaccagttgaaggatgggaataaaaagcccagcccgctcaccgccgccagcacgaagcagaaagcgacgatccagtggttgatgcgttccggcgccgtatagcgcacgatggtgtcacgtcgtttcatttgcgcacctcgtctttctcttcatgcaggttgtcatcttcctcttccgcgcggttcgggccgacgccgacatagtggaagacgctggcggcaaaggtcgcggcaaaaccgaacgcggcgagcggtttccagacgcctttccagaacttaacggtttcgctgatttccgggttttccggcagaccgtgatacagattcggcttgtcggcatgatgcagcacgtacatgacatgcgtaccgcctactcccgccggatcgtacagacccgcgttgtcataaccacgggtttttagttccgccacacgctcgcccgccagcgttttcatatcctctttcgagccaaaatgaatggcgccggttggacaggtcttcacgcaggccggttcttgcccgacggtcacgcggtcaacgcacagcgtacatttatagacgcggttgtcttccgggttgaggcgcggcacgttgaacgggcagccagcgatacagtagccgcagccgatacactgctcggactggaagtcgacaataccgttagcgtactgaatgatcgccccttccgccggacaggccttcaggcagcctggatcggcgcagtgcatacagccatccttacggatcagccactccagtttgtcgttctgttccacttccgagaagcgcatcaccgtccaggatttcgcggttaagtccgccgggttgtcatacaccccgacgttattgcccacttcatcacggatgtcgttccactcggagcacgccacctgacacgctttacagccgatacaggtggtgacgtcgatgagtttcgccacctcttcctggtggtcccgcgcctggggcgcgggggtgaaaccgttagtggcggaacgacgaatgatgtcttgcgattgataagccataggtcgtctccgttacaccttttccacgttcacaaggaaggatttaaactccggcgtttgcgtgttcgcatcaccgacgaaaggcgttaacgtattggcgataaagccttttttcgccacgccttcgtagccccagtgaataggaataccgatggtatcgatatccttgccgtccgctttcagcgtgcgaatacgcttggtcaccaccgctttggctttgatatagccgcggttcgaggagaccttcacggtatcgccatgcgcgataccgagcttattcgccagcttctcgccaatttccacaaactgttccggctgggcgatagcgttaagcaacgcgtgcttggtccagtagtggaagtgctcggtcagacggtaagtagttccgacatacgggaacttatccgctttacccagcgcgtcggcatcgtctttaaagatacgggcggcagggttagagataacgttcgggtgcagcgggttagtgcccagcggcgtttcaaacggctcgtagtgttccgggaacggcccttccgccatcttatcgatagcaaacaggcgacccatcccttccggctgcatgataaacggtccgacgtcgctgccgggcgcggcggcgctgtagtccggaatatcccatccggcccattttccgccttcccatttcagtagctgacgtttcgggtcccagggattaccctgcggatcggcggaggcgcggttatagaggatgcggcggttaagcggccatgcccatgcccagcccagcgtgttgccgagaccagacgggtcggcgttatcacgacgcgccatcatgttgccttccggcgtccagctaccggcgaaaatccagcagccgctggacgtcgtaccgtcatcgcgcagttgcgcgaacgaactgagttgttggcctttcttcaccaccaccgcgccggttgccggatcgataagatcggccagcgctttaccgttactttccatcgccacttcttcagaggcgggttcgtatggtttggtgtagttccaggtcatattcagcacctgttccgggttggcgccgccctgttcagagtacatcttacgcaggcgtaagaagataccggcgaggatttcgccgtcggtcatggcaattcccggggcgtccgcgcccttccagtgccactgtaaccaacgaccggagttaacgatggaaccattttcctcggcaaaacaggtggaaggcagacggaacacttcggtctggatttttgcgggatcaacgtcgttcgactcaccgtggttttgccagaaggtggacgtttcggtgttgagcggatcgatagtcaccaggtacttcagtttggaaagcgatgcgaccactttgtttttgttcgggaatgaggccaccgggttaaagccctggcagatatagccgttgaccttgccctgtttcatcatctcgaagtactgcagtacatcgtaccctttgtcccacttcggtagccagtcgaagccccagctattttccgctgtcgctttatcaccaaagaaggccttcatcatcgagacgaagaatttcggatagttgccccagtagttgacctgatccttcaacaatggcttcggcgtattggcagccagataggtttgcaggtcggtctgtttttcgctcggcagcgtcagatagcccggcagactttgcgacagcagtcctaagtcggtcagtccctgaatgttggagtgaccgcgcagggcgttaacgccgccgcccgccatccccatgttaccgagcagaagctggatcatcgccatagtacggatgttctgcgcaccgatggaatgctgcgtccagcccagcgcgtacaggaacgacgctgttttatcttttgcgctggtttctgcaatgtactcgcacactttcaggaagtccgctttcggcgtaccgcagatattttctaccatgtccggcgtgtagcgtgagacatgctgtttcaacagattccagacacagcgcgggtgttgcagtgtcgtatcgtgtttggcaaaaccgttttcgtccagctcatagtgccaactggttttatcgtactgacgcttgtcggcgtcatagccagtgaacagaccatcatcgaagccaaaatcttcacgcacgatcaggctggcattggtataggcctcggtgtattcacggttgtatttttcgttggtcagcagatacagcatcacgcctgacaagaaggcaatgtcagtaccagagcgtattggcgcatagaaatcggccaccgacgcggtacgcgtaaagcgcggatcgatcacaatcagcttcgcgccgttgtgaattttggcttccatcgcccagcggaacccgaccgggtgagcttctgcggcgttaccgcccatcaccacgacgaggttggcgttcttgatgtcgacccagtggttggtcatcgcaccgcgaccaaatgttggagcaagacttgctaccgttggtccgtgtcagacacgcgcctggttgtcgaccgcgagcatacccagcgcgcgggagaatttttgcgttaaataacccgtctcgttactggatgcggaagcgcacagcatcccggtggtgagccagcggttaacggtaacgccttcggcgttctgcgcctgatagttggcgtcgcgatcttccttcatcagtttagcgatgcggtcaaacgcttcttcccaactgatttgttgccacttatctgaacccggcgcgcggtattgcgggaatttcaggcggctttcagagtggataaagtccaccagaccggcccctttcgggcacagcgcgccacggcttaccggatgatccgggtccccttcgatatggaaaatagatgctttggcgtttttcgcaccgtcgccgaggctgtacatcaacagcccgcagccaacggaacagtaggtgcaggtgttacgggtttcgcgggtgcgcagcagtttatattgccgtgtttccgctagcgctacgccgggcgcgaagcccagtgccgccgccgtggtgcctgccataccgccagcgcagatcttaaagaactgccttctgctgacctgcatggtttgctccttgtttcgacattgtcacttctctttcacatttctctatccgaaacgctcagggagtggttgttatttttctttgcggacgggcccgcaaaggttcagaattggataaattttcctccatccgggaggagttgtaacagaataccataatgttggtgtgtgtgttcttatatggttaaaagaaagtgaacaatatactgtctgaagaagtcctaaatgtgactgatttcacaacctcacgccagttgactctctggaaacgcgaggatttgcagtccccccaacttgatgatgttgccgaggaagtgccagtggcactggtgtataacggcatttcgcatgtcgttatgatggcctctccgaaagatctgacgcattttgcaatggggttttctctgtcggaagggatcattgacagcccgcgtgaaatctatggcatggacgttgtaccgtcctgtaacggacttgaagtgcagattgatctttccagccgtcgatttatggggctgaaagcgcgtcgtcgcgcgctggccggacgtaccggttgcggcgtatgtggcgtggaacagctcaatgacatcggtaagccggtgcaaccgctgccgtttagccaaacgtttaatctcggtaaccttgatcgcgcgttaaaacatctgaatgattttcaaccgacgggtaagctgacgggttgtacgcacgctgcggcatgggtcatgccgtcgggtgaactggcggggggccatgaagatgtcggacgccacgttgcgctggataaactgctcggccgccgcgctacggaaggtgaggaatggcggcaaggcgcggcgctggtttccagtcgcgcgagttacgaaatggtgcagaagtccgcgatgtgcggcgttgaaattctgtttgccgtctctgccgcaacgacgctggcggtcgaggtggctgaacgctgcaatctgacgctggtggggttctgtaagccgggtcgggcgacgatttatacccatccgcagcggttaatcgcagactaaaatagtaccctctacatttgcgtaaaatatatattttctcaattttacagcctctcttgataacggaatcacgtatagtggcgaggccatacaggttttaatcgtttttatgctggaccgcagcttattccagccattcacgaggcgcttgctacccggtaatacttcgaacgaaaaaagcgcccctggggcgctcttttggcagtcgctaacgacttatttgctcagtttagcggttatatgcacgcgatttgcagcgtgaaaagcttagaactcacgctcaagatgatagccattataggtgtcgatgagttcgttataagctttaaccacagcctcataagaaccatctaccatatcgccgctgccgctattgaggtagtcctgctcatgcgaggtatacgccacgttatcgcgcacgcgccgaatgcgttttttcaccttgccctggaatttttccagctcagaaataaagccagggaagctacgatgtttatctatatcaacgttgatcttctcgtttagcttctgagtatgctcttcaaaatcagcgagctgtttgcttactgccgccacatcaaaagaatcatcagctacagcgtcattaagcgtctcggcttcctgcatcgtcaaaagcgtatagtacttaatggatttaccttctttcttctcggtcgccttaatttcattagccgcatgctgcccactcataatggtaatctcggcgatatatttcttcgcaatgggatcaaactcatcgaactgttttataaacgttttatggaacgctttagcgccagcaaaggcatcatccttgaagttatcttgatcatagtatttattcatactattgattgtttcagctagtggcccagccgcattaataaatgccagagcagcactatccagagaggcaaacgccggctttaattcagccgccgccttgatgtctttccggcagtcctggataaatgcaggatacacaggaaccagcggagagggatcgtcttccttaccggtagggccggtgcggaaatcgtcgaatgtgttagcataacgatttacagcacggtaaatatctgcctggagattattataacaatcaatgtaaacattcagcttttggttaagaacatcgttcgcatctgcgctttccgctgatgtgggttgtgtattgctcgctgatgagtccgcactctgagctacaggttgttcgtccgcttttttttcatcacaagcgcttagcccggcagtcatcagcatagcgataataattgatgataacaaatcctttttcattagaataacctataaataatatcattgaaatttacagattcattttaatgaaaaaaaacaggtatgtgatttattcaacacaaaaaatacttaatgcatatttcattataattaacattatcaatatcaatgtgttcgttaaaataagagaaccccaacgtaaatatacaaaaggcaattaaatgaaaaggaatttattatcctcagcgataatcattgcgctaatgaccctgggcgcaacaggatgtgatgacaataatgttaaaaccgaggcgacgccggccgccagcagtcagcctgcgacgccagcgccttctcagacgccggaaacgcaatctggcgaaagtccagcgcagccctcagcagcgaagccagaaacggcaactcagcccccggtggcgaaaccagaaacgccagctcagccggaggttgacgctgaagaagtttatagtgaaaaaatggatgtctatatcgattgttttaataaacttcaattgcccgttcagcacagtctggcgcgttacgcggattgggtgaaagactttaaaaaaggtccgacagggaaagagagcctggtttatggcatttatggtattacggagtcttacataacgaattgccagaaagagatgaaacaggtggccgccttaacgccattacttgagcctattgatggcgttgccgttagctatattgatagcgccgccgcgctgggtaataccattaacgaaatggaaaaatattatacccaggaaaactataaagatgatgcctttgctaaaggtaaggcgctgcatcagacattactgaagaatatcgaggattttaaacccgtctcggaaaaatatcatgaggctattcaggaaataaatgacaggcggcaattgacacagttgaagagaatagaagaagcggaaggcaaaacatttaactattattctctggctgtcatgatttcggcaaagcagatcaacaaggttatttctgccgatacctttgatgccgaagcgatgatgaaaaaagtcgcggaactggaaacaatgattgcgcaattgaaagaagtgaatactgatggccgtaattcttctttcatcagctctgcggctgattatcagctacaagctaaaaaatatattcgtcgcatcagagacaatgttgagtattctgattttgaaaagaaacgggtgcaggaccctgcaacaggatggatggttgcggattcttatccggcgtcgttgagaagttataacgagatggtggatgattataaccgcctgcgttgagtgacggcacattaactgcgcacaggctggcgcaagtgcctataaaattacgcgataacgccaataaaaagcgccgatcaggcgcttttttcgttcatgtattcttcatcaggcaatatccgtaaaaatagctgacgtaaacattaactaaagagagttattagaaaaaccagtaatctgaagctatcacaagatgttgacgtcacgctggaaggtactggtagtgtcattgaggatcggcatttatatggaaagcatttatccccctgatgcgaaaattctgagctacttcagcatagggcggcccagccttcatcacttatagggtgtcacgtccaactgttctgtaagacgttaattaatacctgccagccgcaacagtgctgtcactaccgcagcggcgataatcaccacaataagcggcattttacgccaggctaaaaatacggcgaagccaaccccaagaacgcgcgccattccggcaaaatgttcgccttcgtaaaaggtggtcgccagcgcgacggagaatagcagcaccgttgccgcatccgagagcagcgcctgtgaacgctcagacagcgccagacggctgccaagtttcgcgccgccgaggcgcatcaaataggttcccgcagacaaaagagcaataccgataataaatagcgtcatattgcccattattttttcctcgccagtaggccaagcagcgaaagcaacaccggcaatccggcagccacaaaaggaacggcggcaagcgacagcgcggcgccgctgcaaccacgaatcaatgtggtgcggtttttaaacgccgggatcaccagcgccagtaagattgccgggaatacggcatccagaccgatggtttctggggccggaagcagtttgccgacaccagcgccaatcagtgtgccaatcggccagaatagggcgacgcccagaccgcatagccagtaggcggctttacgttgttcgggtgttttttgcgacaggccgaacaccacgctctcatcattcataatatggcagccgaaaaagctggcggcgcgggtgccaaccaaatcgcgcaccgttacgccaaacggcacgtggcgcgcattcaccagcagtcctgccgccgccgccgctaacggattgccgccgctggcaacaatgccgataaacataaattcggacgcgcccgccagcacaaaaatagagaggacaaacggcacccacagtgggaaaccgtaggccatcgccagtgagccataggacatgccgacgacgcccacggccaggcacactaaaaatatcgcttttatcgtgtctcccttgagacaggaaaaatagtgtttcatcttctttagtcatatcgaacgaattttcattataatgaacggaacagatttgctttacaagacgaacatttcgttcgttatagtgaacgttggatgctttatgacacaacctattagcgtcattgccagaagtctggtacgcgaacgccagcgaaccggactgtcgctggcggagattgcgcggcgcgcaggcatcgctaaatctacgctttcacaactggaagcagggaacggcaaccccagcctggagacgttatggtcgctatgcgtcgcgctcgacattccctttgccaggctgctggagccgcaggtacaaaaaacgcaggtgattcgccgcggagaaggcaccaaagtggtggcggagcaggcgcattatcaggcgatattactggcggcgtgtccgcccggcgcgcggcgtgatatctatctgctgttgacgcagccgggggccgaccggatctctcatccgcatccgccggggtcggtggaacatattattgttacgcagggaaaagccctcgtcggcttaaccgaggcgccggaagagctggcggagggcgattacatttgttatcccggcgaccaggcgcatatctttaaagcgctggaaccggatactcaggctatcctggtagcggagcagaattgaaattgccggatggcggcgtaaccgccttatccggccgacaaaaaataaaaccgtaggcccggtaagcttgcgccatcgggcacacgacttactgcagatagaacacctcttttagctctgcgctgaccgggctgttatccggattcgcgggcataacgtcacgcatatgtttccaccaacgctggcaaacgtcggtgctggcaacggcgttccagcgctcctcggattcaatctcaacggtggcgaacagcagattgcgctcctgatcgagataaatcgcgtagtgatgcgcgccgtgagattttaatacggcttccagctccggccagattgggttatgacgacgctgatactcctcgtgcgcgtcggcatttacctgcatcacaaaggctttgcggatcataacgcctccaggtacagcccgcgaacttcatcgcggctggcggtgcgcgggttacacggcgcgcacgggtcggcgagggctttatccagccagccttcgatatcttcttttgtgacgcccagcttgctgaaaccttctggaatgccgacgcgtttgctcagcgtacggatagcgttaatcgcttcctgacttgcggcttcgtcagacataccgcgcgtctctacgcccatcgcctgtgcgatacgggcaaaacgcgcgacggcgttcggacggttaaagttctcgacaattggcagcaggatagcgttgcagacgccgtgcggcaggttgtgagttgcgcccggctggtgcgccagcgcgtgaaccagccccaaaccggcgctgttgaacgccatacccgccaggtactggccgaatgccatttgctcacgggcttcgaggttatggccatcgtcaaccgctttcggtagccacaaattgattaagcgaatcgcttccagcgcgttagcgtcggtaagcggatgcgcgccaacggagacataggcttccaccgcatgggtcagggcatccatgccggttgcggcggtcacagacgccgggatttccagcatgacgctggcgtcatccacggcaatatccgggatgatattcgggtcgatgatcacctctttgaccttacgggcagagtcgataatcaccgcgttgctggtcatctcggccgcggtacctgccgtagtattaatcgctaccagcggtacgccggcgtttttcactttgccgacgccggagtaggcggtggaagggccagggttggcggtgaggattttcaccgcttttgcggtatcgatcgggctgccgccgccgaaggcgataatgtagtcacattctgcgctctgatacgccgcaaaacctttctgcaccagctcttctgtcgggtttgggaacacctcatcaaacaggtggtaagacatttgatgttcatccagtgcgctaaacaggctatccagcaggcccagctttaccagttgaccatcggtaacgatcagcgctttgccccattgcttattcgccacgaggttcaccatatcggcaatcgctccagcgccatgcaggctaatttttggcagtgccaacataaagctcatcactattctccttaaaaaaattccctgttgcccgatggcgctacgcttatcgggcctacggtaaaatgcgcaccgtcctgtaggccggataaggcaaagccgcatccggcgttgagttgggaggtatcagtacagcgctacggcgctggccagcggtgtcacaccaaaacgtttgccgagtgcgaccagttcttcgcgcgtgatggtctgcttcataccgcccatcgaatagattttgactaatacctcagcggatttctctgcggtatctatcaaaccgaaggtttcatccagcgtaggtccgcttccgaacacgccgtggaacggccacagtaccagcgaatgtttctgcatttcttgcgcggtagcctggccgatttcatcggtgcctggcaccatccacggcagaatgccgacaccgtccgggaataccaccaggcattcggtgctgccttcccacagtttgcgggtgatcagcgcagtgttgttttccagtacgtaggtgagggcgatcaggttagtcgcatggcaatgcataatgacgcggtctttgccgtgggtggctttgatgcgttcgcagtgggagaggaaatgcgccgggagttcagaggtgggtaccgcgtcgtgggttaagccccacagaatgtggtagcctgcgccgtcactgtcgattttgaccacgcctaaattggctgccggatcgagctgcacgttgcggaagaatttgccggaaccggtaacgataaacggcgtattcgccagcagcggcatgggttgacttagcgcgatgtagcgcggtttttcgtggaaattagctgcaaacggtgcgatatcggcttcatccagacgcagcgtcaggttaccgccattacgttcgtcccaccctttcagccacgcatcagacgtggctttaatcatgccctggacgaaccaggaatcggtaatattttgcatgttcgtgttcccatttattgcccgaaggttattcgggtcttacgtaggccggataagcgcagcgccatccggcaatcgtgtttcatttattgccggatggcgacgcgggcgtcttatccggcctacagatcaggtgtcgctgtcagctacgtttgctcaggatctctttttcatagacgcgaacgctgtccagccactggctgccagccggcgtgtcgtgacgctggcaatacatttcccagacggcctgccacggcagagatttttgctcttccagcagcgccagacgcgcggtgtaatcgccgctggcctcaagctgacgcagttgatctgtgggttccagcagagcgcgcagcagcgcttttttcatgttgcgggtaccgataacccacgcggcgacacggttgatagaggcgtcgaagaaatccagaccgatatgcacacggtcgaacaggttatgacggacgatttcgctggcaattgcctgggtttcatcgtccaggagtaccacgtggtcgctatcccagcgtaccgggcggctgacgtgcagcagcagccgtggcacatagagcatggcggcggaaattttgtcggaaatcacttcagtgggatggaagtggcccgcatccaggcacagcgcggtctgacggctggtggcgtagcccatgtagaactcattggagccgacggtgtagctttccgcgccgatgccaaacagtttgctctcaacggcgtcgatgtggtgcgccgggtcgaatttctcgctaatgacctcatccagcgcttccagcaggcgctggcgcggggctaaacggtcgacggtaatgtctttcatgccgtccggaatccagatgttcatcaccgacggcgtaccgagctgctcaccaaagtatgccgagacgcggcggctggctttgcagtgatcgatccagaactggcgaattttcgcgtctggatgagagagggtaaaaccgtcagcgctcagtggatgagaaaaacaggtggggttgaaatccagccccagccggttcgctttcgcccactccacccagtttttaaaatgctccggtttgatctggtcgcgagcaaccggcgtatccgactcaaggtaaatggcgtgtaggttcagccgttttgggcctgggatcagacgcagcgcctgttccagatcggcgcgcagttcggtggcgttacgcgctttgcccggatagttgccggtcgattgaattccgcccgtcagcgaaccttccgggttctcgaatccggcaacatcgtcgccctgccagcagtgcatggaaaccggcaggcgatcgagctggcgcagcgcctcctcgacatcaatacctactgcggcgaaacgttgttttgccagttcccaggcttgttccagttgagtggtcatgcgcaaagctcctttgtctgtcgtttgggttgaaactgcgcaacgtggcgggcaatttcactatcaggattagggatataggttgtcaggtcgtagttagcgctgacgacctgacggaagtcatcgacgttgtttaattcgtcgagggtcataagctgaataccaatattgccaagggtggaggcttcaaccggcccggccatcacgcgaatgccacatgcatcggcgcacaactggttgagtagcgagttttggcatccgccgccgacaatatgcagttgggtaaatttttcgccgcgcagatttgcctgttcgtgcagaatgtcggcatacaacagcgccagactgtcgaaaatgcagcgcgccagttcggcatcgctgacgggaacgggctggtcggtctcgcgacaggctgcctggatttcagcgcgcatatcgtcaggattgataaagcgatcgtcattcgggttaatcaggaaacggcaggccggcagcgcttctgtttgggcgataagcgcaggcagatcggtaatgcgccgttctttcagcacacgctggagcagccacaaacccataatgtttttcagtacccgataacgcccttccgcgccgccttcgttggtgatattggcggccagcgcctcatcagtggtgtagggcattttgctttcaaaacccatcaatgaccaggtgcctgaagacaggtaagcgctatgtttatttgccagcggagaggcaataacggcgctggcggtatcgtggctggcgacggctaccaccggaatacggttgccctgcgggcaaatccagtcgccgataacattgccagggtgcgaggggcgaccgaaccagctctttttcgcgccagtccacgccagcagggtatcgtcccagtcatcggtattgatattgaccaactgggtggtcgtggcgttggtgtattcccagttcatttcaccggtcaggcggtagctgaaataatcgggcatcagcagcgcatgagcgacctgcgccgttaactcaggctgttgtttcgtcagcgcgcgtagctgatagatggtgttaaacggcagaaactgaatcccgctgcggcgatagatttcgcttttgccgatctggaccagcgcttgcggcatgatgcccgtggtacggttatcgcggtaggagaccggcaggccgacacgctgaccttgtttatccagcaggacataatcgacgccccaggtgtcgatgccgatgctgtcgataagaatgccttcattgcagactttcttcagaccaagacggatatccttttccagactgtcgatgtcccaggtgtcaaacccgtctgttttttgtaggcagttcacaaaacggtgaatttcacgtagcgtcagggtacggtgtttgctgtcgtaacgcgccagcatcacgcgcccgctggatgcgccgagatcaaccgcgacacaatggcgaaaagtcataatcaggtccttcttagagtcattgcgcacagtctaaaaaagccctcaaagacctaccttctcgttactgacaggaaaatgagccgctggcaacaaggcaaagatgaacgtgatagcgttcacagtttctactaataggccggtgtgatgtcgtccgcatttcccgctttttcccgccttttcttgaaaaaaagaccatgtttgcgcgctttagcgtcaaaaatttaaggtgaggccgataacccttaattactattcggacatgttgaattcaggaggaagcaaccatgaccgtactgcatagcgtggatttttttccatcaggtaaagcgcccgtggcgattgaacctcgtctgccgcaagccgctttccctgaacatcatcatgattttcatgaaatcgtgattgtggaacacggtacgggcattcatgtattcaacgggcagccgtataccatcagcggcggtaccgtgtgttttgttcgcgatcacgaccggcatttatatgaacataccgacaacctatgcctgacgaatgtactgtggcgttcaccggacgccttccagttcctggcggggttggatcaattgctgccgcaggagcaggatggttactatccttctcactggcgggtgaatcagagtgtgttgcagcaggtgcgccagttggtcggtctgatggagcgcgccggagacggcatggatgcgcctgccgtggcgaatcgcgaaattttgtttatgcaactactggtgttgttacgccgcagtagcctgatggaaggcgcgaccaataacgacgccaaactcaaccaactgatggcatggctggaagaccattttgcggaggaggtctgctgggaggcggtagctgaacagttttcgctgtcgctacgcacgctgcatcgtcagcttaaacagcataccgggctgacgccgcaacgttaccttaatcgcctgcgtttgatcaaagcccggcatttattgcgccatagcgatcatagcgtgacagaaatcgcgtaccgctgcggttttggcgacagtaaccacttttcgactctgtttcgccgagaatttaactggtcgccgcgggatatccgtcagggacgcgatgcgataatccagtaacgcgaacgctatcaacgttttcgtcgccaatatgctgataattataccctttaataccggatggcggctgcgccttacctggcctacggcggcgagcggtagacagaataagcgtagcgccatccggcaagcattcaacatgaggtgctgcggtggcaaatcagttaatccttttgaaaaaagatttttttactgatgagcagcaggccgttacggttgccgatcgctatccacaggatgtttttgcggaacatacgcatgagttttgtgaactggtgatggtctggcggggcaatggcctacacgttcttaatgagcgcccatacagaattacccgcggcgatctgttttacattcgtgctgaagacaaacactcctatacttccgttaacgatctggtgctgcaaaatattatttactgcccggagcgtttgaaactcaatgtaaactggcaggcgatgattcccggctttcagggagcgcagtggcatcctcactggcggctgggcagtatgggaatgaatcaggcgcggcaggtcattaaccagcttgaacatgagagtaatggacgcgatccgctggcgaatgagatggcggaattgctgtttggtcaactggtgatgacgttaaaacggcatcgctacgcgaccgacgatcttccggcaacctcccgagaaaccctgttggataaattaattaccgctttggctaatagccttgagtgtccctttgcgctggatgcgttttgccagcaggaacaatgcagcgaacgggtgctgcggcagcagtttcgcgcccaaaccgggatgacgattaatcaatatttacgccaggtccgtatttgccacgcgcagtatctgcttcagcatagcccgctgatgattagcgagatttcgatgcagtgcggttttgaagatagtaattatttttcagtggtgttcacgcgggaaaccgggatgacgccgagccaatggcgtcatctcagtaatcaaagcgattaactggccatgcctaaaccgacaatattcgccgcgataataattaccacgcagccgaggcttaatacagcaacgggacggcggccagcatttttccactcttttagcaccagaccgacaagccccccgcacagcacatagaagctcatgtgcagcatccagctcatgtagtcatattgcgctggaatgcgcgcgtgaccccaggcatagaaaaagaactgcaaataccacatcagaccgccaagcgcggacagcagaatattgctgataatcaacggtcttgccagcgagaagtcggcttttatcgacagattttgtacttttgccaggcggataaaacagaaaccgaggttcaccagcgcgccgccgcccataatcaccacgtaactcggcagcgcgacatagagcgggtcaacgccaagcgcggcagcagcttcatgcatcggtttcgcggcgttcatggcaaaagacattcccgccgagaaaataccgcacatcactgccagcagaagccctttcttcagattgaactcctccgctttaatgcccattttgcgttcttttaactgtccggcgcgcgtcacaatcccgacgccgatcagcgcgacaaaaacgccaagtagcgtcatgcgtcccccttcggtatgaattaacacatcgaagttaccgttgatgataggcgtcatcagcgtgccgacgataagcgtaatgccgatagcgatgccgatacccatcgacatgccgagataacgcatggtcaggccgtagttaatattgccgatgccccacatggcgccgaacagaaaaaccggtaaaagggtggagaggttaaactgcccataataggcccagaaatcaggcagtaacagagcgctaattgtccacggcagaataagccatgagacgatgccgcccactgaccacatggtttcccatgaccactgtttcacttgcttgaacggggcatagaagcaggctgcactggccgcccctatcaaatgccagaaaatacccatcgtaatcgcgttactcatgacatgttcctcattattttttatggacgggataccccttccgtttgcatgagtttaaaaattacgcagcctggtaaccttataacgattgccgccgttgggtgtattctggcaatcagcacgttaatgaagtgattaacttcacgttttaaaaaagtcggagcgcatcgtgaccgtctggatgttatttaaatcagtgggtaatatttgttttctaaaataccttcatcataacgacacgaaacgacttagctggcaacaatgcaaagaaaacgctgcgtgaggtcacataatgggaatagtctgacttaccgtttgataaaagggtagttatacagtaattatttggttgttttatttgtatttacaatttaaatatattgaaattaacgttaggaatcaattaaatataaatataaggaaatccctatattggcgttgttgatggtgttttgatttttattttatatgacgaatatgaatttcatttattttattttgctttttgaacattatcccaattttaaattaaagatctttgtctatattgtcgccattcacattgcgtattatggttgtaacggtctgacatgaaacaacgttttaattttaaattaaatggattctgttatgagaaaatctcttttcttactattacctcttgttgtaacaaatgcgcatgcagtatatgtcgatgttcgtcatgaatatcttgatgacagtaaagctaactatgaccgtgcgtatatttctcatcggtttgcgaatggtgttggttttgcgatagaagctatctcaaaatcaggcggggatgacaccaataaagcgtttaatgacctagaaacacagggcaacgaatatacgataagctaccaatttaaaaccggtgatgtcgcctggcaaccgggtttcgtgctggaaacaggcaacggttactctacctataagccttacttccgcgcgacgtggacattaaatgaaagctggtgggttggcgcgcgctatcgttttgaatatgtacgccgttcttctgatatccgtgatgatgataccatcaatcgtatggatgtctgggcgggttataaatggaacaactttgactggacaatcgaaggaatttataagaaagccgataaatatgatctttacgatggcggcaaagataactatgaatataacttcagaactgcctatattattgaccaatggtcgccattcgttgaggtaggtaatgtttccgtcaatagcaacagcgatgaaagacaaacccgtttccgcgtgggtataggctacacattctaatcattatccctgtttattatttattcccttttccggctactttataggtagccggttttttttacctggtgatgacctgcggataattattatcgcgcgttggccggataagacgcgaatcgccatccggcaacgagatgtgcaggaaactatgcgcttacatgatgcccagtagacggggtaagaacagtgtgatttccggaatgtaggtaattaataacagaacgccgataatcgcgccgtaaaaaggcagcaacggtttaatcacttcctcaactttgaccttaccgacgctcgccccgacatataaaccactgccaactggcggcgtaatggtgccaatcgccaggttatagatcatgataatgccgaaatgcaccggatcgacgcccagtttagccatgattggcagcagaatcggggtaaaaatcagaatggccggaccaatatccataaatgcgccgataatcaacaaaaagacggtaatgactaacaggataaccagtttattggcggaaataccgaggatcatatcgctcagcgccgcaggaatattggtgatcgacatcgagaaggacatcgccgaagaggttgccagcaggaacatgatgaccccggtcattaccactgtctggagcaaaatcgaaggcaaatccttaattttcagcgtgcggtaaaacaccatcgtcagcaataacgtatacaccacggcaatcgcggaggcttcaatggcggtgaaaatcccctgcacaatgccgccgacaataatcacgatcagcagcaggctgggaatggcctcaacggcaacttttagcgccatacctttttggacggtgaagaaaacccgataatttcgacgcttagcgaccaccagcgtgaccagcatacagccaacgccccacagcactcccgcgaccagaccgccggcgaacagagcggcaatcgatgttcccccgcttgccagcgcgtaaaggataaaagccgtggtgggcggaattaacattcccgtcggcgcggaggcgatattcaccgcggccgcaaagccgcgatcgtaaccttcgcgcgcgctcatcggcaccatcacgccgccgatggaggttgaggcggcaatcgccgatccggaaattgcaccgaacatcatattgccgacgatgttggtataagagagcgagccgggcagtttgccagtaaacagtttggcaaaattgaccagccgggcggcaattcccccgctattcatgatcaccccggacaaaacgaagaacggcacggccagcaaggcaaaactgtccaggctggagaacattttttgcgcggtggcgaacatcgaaatatcgaaaggcagtaccagcatcatggtgctgaaagaggcgataacgatgcagatcccgataggcgcgcccatggccagtaaaacaacaaagacggcaattagcgtacaggacgcaaaaatagggtcaatcatgtgatttctccagagtgtgctcagtggtatccgtggcggaatggatagctttcagggcgtcaacgatattcagcagcccatagaggatgatcagtacgcccgcgcaggggagcgcgtaataaatttttcccatcggaatgcccagcgcaggagagatttgcagcatagaaatcgcagaaatctttaagccgccgataatcaatacccaaatggaaaacgcgataaaaatgacctgcaggataatatcccaccagccgcgaatcgtcggcgacaccttatccagtaagagagtcaggctaatatgctgtttctgaccggcgacaaaagccatgcccagcattgatacccacaccaggagaaatcgcagcatctcttcggtaagggtgctgggaacgcccagaatgtagcggctcaccacctgccagcaggcgatgccaaccattatcgccagcaccaggcaacagatagcgcccagcaataaatcaagtccttttctgaatgtgttcatcttaatttcctgattagattaattttttgctgtctggatacgttgatacagcccgtaaagccgcggtttgtttttcagaccgtcgtaaataggctgtactgcctcctggaagggttttttgtcgatctcgtagaattcaacgttgaaatcttttaccgccgccagcctggttttctctatttccttgtcccatgcggctttctcaaattcgatcgacgccttgatggcggcttcgacgatgcgctgctgttccggcgtcagcttttccagcgtgagggtactcattagcaggatatcgggaatgcgggtgtgcatatcgtaggtgtaataacgggcgacttcgccgtggcgggcgatggtgagagcgaactcattgttttccgcgccgtcgagaatgccttgttgtaatgaggtatagacctccgcctggctcatggcgataggcgaagcgcccagcagtttgagggtttggatcgccgtctcactctgcatgacgcggatctttttcccgcgtaaatcctcaatgcgtttaatcggcgctttgctcatataaaaattacgcgcgccggaatcataccagcctacgccgataaacccctgcgcggcggtggactgataaacaggctccatcacctgcgggttatccattacgcggtagtattcctcgacggtggcaaacaggtagggaagtgagaacacgccgtactcaggcgaaaaactctccatcagcccggacgacactttagtgatgtcgacgacgccgacctgcgtcaactccaccagttcgcgctcgccgccaagctgtccgtccgggaagtactgtactttgatatcgccgcccgttttctcttccacttgctgccccaggaagtgcaacgcatcttttaccggctggctattttcagcgtaggccaggcgcaaaatggtttcgccgtgggagaagaaagagagtgtggagagtaaggccaacgtagccagacgtataaaaccaggttgcttcatgattccctcgcaattgtaataatttaccgggaatgtaattgcagtgtgaaattataaccttcttgattttgccaccgctgacaaaatttggcaccaaaagaaagattttgaaaccctgtttcacatttcatgatttccaggaattcatcaacaggcggtttcggttggaggcgtaaaaaacggtttttttcagcggatgccgtaacgtttataaccctggaaaaagtacggcattgataatcattttcaatatcatttaattaactataatgaaccaactgcttacgcggcgttaacactgtgccgctcgacaataatggagatgattatgagttatacactgccatccctgccgtacgcttatgatgcactggaaccgcacttcgataagcagacgatggagattcaccacaccaaacaccatcaaacctatgtcaacaacgctaacgcggcgctggaaaacctgcctgagtttgccagcctgccggttgaagaactgattactaaactggaccaggtgccagcggacaaaaaaactgtgctgcgtaacaacgcgggcggccatgctaaccacagcctgttctggaaagggctgaaaaaaggcaccactctgcagggcgatctgaaagcggctatcgagcgtgacttcggttccgttgacaacttcaaagctgaattcgaaaaagcagcagcaacccgtttcggctccggctgggcgtggctggtgctgaaaggcgacaaactggctgtggtttctaccgcaaaccaggattccccgctgatgggtgaagccatttccggcgcttccggcttcccgatcctgggcctggacgtgtgggaacacgcttactacctgaaattccagaaccgccgcccggactacatcaaagagttctggaacgtggtgaactgggacgaagcagcagcgcgtttcgccgctaaaaaataatttgcattgcacgtctgtagaagcgagtctgatgactcgctttttttgtatccgcgtaaggagcagcagatgcattatccggttgacgtgtttattggcaaaattcgtgactatgacggcagccgcccgagcgctatcgccaaggtgcaaatcgacggcgaactcatgctgaccgagctcggtctggcaggcgatcagcaggccgaaaagaaaatccacggcggccccgaccgcgcgctatgccattacccccgcgaacactatgctgattggattcgccagttccccgagcaggcgacgctgttttgcgccccggcgtttggcgagaatctgtcgacgaacggaatgaccgaacacaacgtgtttattggcgacatctaccgctggggcgaggtgttgatccaggtcactcagccgcgctctccatgctttaaacttaatttccactttgccatcagcgacatggccctccttatgcagaacagcggaaaaaccggctggctgtatcgggtcattgcgccaggtaaggtctccagcgatgcgccgttggaactggcgtcgcgtctgagcgatgtctcggttcatgaagcgggtgttatcgcctggtctatgccgtttgatgacgaacaatatcaccggctgttgagcgccgccgggctgtcggcgagctggagccgcaccatgcagaagcgtcgtttgagcggcaaaattgaagatagcgccagacgactgtggggggataaaactccgccaaaatgaaaggaaggattatgactgaagctgaaaatgcggtggcgatcgtaaaagaatttttggtggcctcgatgattcccgatgctgaacgcgccgcaacgtatatgcacccggaggtgaaaattaccttcaccggaggccgggcaatggctggcgcggcagatatcgcgcagtttaacggcgctcgctacaagtgggtgaagaaggcgctgggcgagtttgatgcggtgcagcatgatcattacgttgtgatttattccaacggtacgctgtatggggaatggcccgacggtcgcccgtttgccggtaatcgctttatcgatcgtttcgaagtgcgcgatggcaaaattacccggatggacgtgtggaacgacagcgccgagtggattctggtgccggaaatctcccggtaaatctcgacggcgagataaaaaatcggcctgcattcgcaggccgatggtttttaggttcgcttgtacagcggtagccacagcgtaagccgcaacccacccagcgggctatcgtcagccttcacccagccgcggtgctgctgcatggcgctttcgacaatcgccagccccagcccggtgccgccagactcgcggtcgcgcgcctcatcagtgcgatagaacggacggaagatctgctcgcggtcttcagggctgacgcccggcccgtcgtcatcgaccgtgatcgtaataccgtctttatccaccgagaagccgacttcaatcttcgtatgtgaatagcgcagcgcattacgaactatattttccagcgcgctttccagcgcgtttgggttgccatagagcggccacggccccggcggataatttaccgttaacgacttgcccatctgttcggcttcaaaggcggcgttatccagcacttcgccccatagctgattggctttcatcgtttcgctgaccagcgcatttttctgttggttacgcgacatcaccagcaggtcattgatcatgctgtccagacgctgcgcttcggtttcaatacgctccagctctttgctttcgccgccacgacgacgcagcagcgcggtacccagttgcaggcgcgtaaggggcgttcgtagctcatgggagatgtctgacagcaaacgctgctgcgaggtcatcatccgttccagcgccgtcaccatctggttaaaactggcgccagcggcgaggaactcctgcggacccgcctccagctccggatgctgacgcaggttgccttgcgccacttcatcagccgcgtttttcaacttacgcgccggtttcgccagactccatgccagccatagcaagagcggcgaactgaccagcatcgtgacaatgagcaacagaagcgggcggtcaaacagcagattaataaaatcggattgcgaactgctggccggtcgaatcaagtaaagctggtaattatcctctccgtcgcgaacggagaacggccccaccatctctacgcggccatattttttcttctgcggatgatcggcgttatccgcctgaccaatgaagttacgaatgatctgcatttcgctgcgttcagcgccgatcacgcgtccttcagaggtcaccagtaataaccgctgtccaggcggcgcccacttatcgatcgcgcggaacaggcgacgccaccacatcaggtcgttgggcggatcgttcgcaagttcagcttctacatgttgctctatcatcaatccctggcgctgttcgctgtccagcagctcggtcatctggcgtgaatcgagcttgggcaacatcaggaccagcattagcaccagcgccagcgtcaaccagaagatggcgaagatgcgcgcggttaaacttcctatcatgaagcggaaaccatcagatagccgcgaccacgcaatgttttaaaccacgggtgaccgtctttgcgttccggcagtttgcggcgcaggttagaaatatgcatatcaatggcgcgatcgaacggcgtcaggcgcttacccagcacttcctgacttaaatgttcacgggaaaccacctggccgaggtgttgcgccagcaaatagagcagggtgaattccgtaccggtcagctccagcgtttggccatcgaaactggcttcctggcgacccggattaaggcttagcgcatcgacttccagcgtcggcgagccgttgtcgctgctctgctgctgttcgctccagtgggaacggcgcaaaatagccctgatgcgcgctaccagctcgcggtcgttaaatggtttgggtaaatagtcgtccgcgcccagctcaaggccgagaacgcgatccagctcgctgccgcgcgcggtcagcataatgacaggcgtctggtgtgtctggcgaagcgctttcaacgtatcgataccgtttttcttcggcatcatgacgtcaagcaaaagtaaatcgatgctgtcatccaaaagctcaagcgcctgctcgccgtcgtgggccaccaggacattaaaaccttccatttcgaggagctcttttaacagggaagtcagctctcggtcatcatcaactaacaggattttattcattgtttacgtacctccgaggcagaaattacgtcatcaggcgtcgctaatccatgactttacgttgttttacaccccctgacgcatgtttgcagcccgaatcgtaaactgtctctcgttgaatcgcgacagaaaagattttgggagcaagcgatgcgcaaagttaccgctgctgttatggcctcaacgctggcattcagttttttaagccacgcagctgaagttgttacaagcgataactggcaccccggtgacggggccacgcagcgtagcgcgcaaaatcatatgtttgacggcataagtttaaccgaacatcagcgtcagcagatgcgagatcttatgcaacaggcaaggcacgaacagcctcctgttaatgttagcgaaatggagacaatgcatcggcttgtcaccgcagaaaaatttgatgaaagcgctgtgcgcgctcaggcagaaaaaatggcgcaagagcaggttgcccgccaggtcgaaatggcccgcgtgcgtaaccagatgtatcgcctgttaacgccggagcagcaagcggttttgaatgaaaagcatcagcaacgaatggagcaactgcgcgacgtggcgcaatggcaaaaaagttcatcgttgaaattattgagtagtagcaactcacgttcccagtaacaaccctgttttccttgccatagacaccatccctgtcttcccccacatgatgtgggggttttttttatctccagtttgtcattctgttattagcttactgttttaaaccatccgttatactaccggcagaagatagcgggagtatttatgaatcaaacctatggacggctggttagccgggcggctatcgcggcaacggcgatggcatcagcgttacttttgatcaaaatttttgcgtggtggtatacgggatcggtgagtattctggcggcgttggtggactcgctggtggatattgccgcgtcattgacgaatttgttggtcgtgcgttattcgctgcaacccgcagatgatgaacacacgtttgggcacggtaaagcggagtcgctggcggcgctggcgcaaagtatgtttatttccggttcggcgttgtttctgtttttgaccagtattcagaatctgattaagccgacgccaatgaacgaccccggcgtggggattggcgttaccgtcatcgctctgatatgcactattatactggtcacgtttcagcgctgggtggtacgcaagacccaaagtcaggcggtacgggcggatatgcttcattatcagtctgatgttatgatgaacggagcgattcttatcgcgctggggttatcctggtacggttggcatcgtgcggatgccctgtttgcgttaggtatcggcatctatattttgtatagcgcgttacgtatggggtatgaggcggtgcagtcattattggatcgcgcgctgcccgatgcggaacgacaggaaattattgatatcgtgacgtcatggccgggagtcagcggcgcgcacgatctccgcacgcggcagtcagggccgactcgctttattcagattcatttggaaatggaagataatctgccgctcgttcaggcgcattttgtggctgaccaggtagagcaggcgattttacagcgttttccgggttcagatgtcattattcatcaggatccctgttcagtcgttcccagggaaggcaggaagttcgagcttgtataattgattgttaaaaagtgagccaggccagcattttgtgtataaattaccgccatttggcctgacctgaatcaattcagcaggaagggattgttatactatctgtatattcgttggatcgtttcgaagtgcgaaatcggcttccggcaatagatttcattttgcattccaaagttcagaggtagtcatgattaagaaaatcggtgtgttgacaagcggcggtgatgcgccgggcatgaacgcggcaatccgcggtgttgtgcgcgcagcgttgacggaagggctggaagtcatgggcatttatgacggctatctgggcctgtatgaagatcgtatggttcagcttgaccgttacagcgtatctgacatgatcaaccgtggcggtactttcctcggttctgcccgtttcccggaattccgtgacgaaaatattcgcgctgtcgcgatcgaaaacctgaaaaaacgcggtatcgatgcgctggtagttattggcggcgacggttcttatatgggtgcaaaacgtctgactgaaatgggcttcccgtgcatcggtctgccaggcactatcgataacgacatcaaaggcaccgactacactatcggctacttcactgctctcggcactgtagtggaagcgattgaccgtctgcgtgacacctcctcttctcaccagcgtatctctatcgttgaggtgatgggccgttattgcggcgacctgacgttggcggcggctattgctggcggctgtgagtttatcgtggtgccggaagttgaatttaatcgcgaggatctggtggcggaaatcaaagccgggatcgcgaaagggaaaaaacacgctatcgtcgctatcaccgaacatatgtgtgatgttgacgagctggcgcactttattgaaaaagaaacgggccgtgaaacgcgtgcgacggtgctcggccacattcagcgcggtggttccccggtaccttacgatcgcattctggcttcccgtatgggcgcgtatgctattgacctgctgctggaaggccatggcggtcgttgtgtcggtatccagaacgagcagcttgttcatcatgacatcatcgatgcgattgaaaacatgaagcgtccgttcaaaagcgactggatggagtgcgcgaaaaaactgtactgattgtttttgcgcgcctgatggcgctacgcttatcaggcctacaggttgcagaaacgtgtaggccggattaggcgttagccgccatccggcaatccctcagatttattcctcgaagttatagccaatctttttttattctttaatgtttggatctctttctggcacgctttgctcatcacaacacaacataagcgagtctggcgatgaaaaagtggggcgtgggattcacattattgctggcgtcaaccagcattctggcaaaggatattcagttacttaacgtatcgtacgatccaacgcgtgagctgtacgagcagtacaacaaagcgtttagcgcgcactggaagcaggaaaccggcgacaacgtcgtgatccgccaatcgcacggcggttcgggtaaacaggcgacttccgttattaacggcattgaagccgatgtcgtgacgctggcgctggcttacgatgtggacgctattgcggaacgtggtcgtatcgataaaaactggattaagcgtctgccggataactcagcaccttacacctccaccatcgttttcctggtccgtaaaggcaatccaaaacaaattcatgactggaacgatctgattaaacccggtgtgtcggtgattacgccaaacccgaaaagctctggcggcgcacgctggaactatctggcggcatggggctacgccctgcaccacaacaataacgatcaggccaaagcgcaggactttgtcaaagccctgtttaaaaacgttgaagtgctggactccggcgcgcgcggctcaaccaatactttcgttgaacgcggtatcggtgatgtgctgattgcctgggaaaacgaagcgctactggcgacgaatgaactgggtaaagataaattcgagatagtgaccccgagtgaatctattctcgcagagccgaccgtttccgtggtcgacaaagtggtggaaaagaaagacaccaaagcggtagcggaagcctacctgaagtatctctactcgccggaagggcaggagatagcagcgaaaaacttctaccgtccgcgcgatgctgacgtggcgaaaaaatacgacgatgcgtttccgaagctgaagctgttcaccattgacgaggtgtttggcggctgggcgaaggcgcaaaaagatcacttcgctaatggcggtacgttcgaccaaatcagcaaacgctaaaccgtttataaacccggtaacgtattatgttaccgggttttttctttgccacaattttgcgttactcttccccgtctatgggtcacagggaacgcatatcatgaaaaaaacaggctactttttactggcggtgatagtgattgtcgccgcggcgggcgtcggttactggaaattttccggcaaccctgatgcattacgggaaatcgtgcttgaacaatgcctgcccgatcagttacagcatcaaaacccagcgccgtgcgcggaagtcaaacctcgcgctggctatgtcgtctttaaagatcgtcacggtccgttgcaatatttattgatgcccacctaccgtatcaacggtacagaaagcccgctattgctggaacccgctacgcccaactttttctggctggcttggcaggctcgcggctatatgagtaaaaaatacgggcatgatattccggatagcgcggtctcgctggcgattaattcgcggcttggtcgttcacaggaccatttgcatatccatatttcttgcatccgtcctgacgttcgggaacaactggataacgatctcacgcgcatcagcactcgctggcttccgctgccgggtggcctgatggggcatgaatacctggcgcgccgggtaaccgagagcgaactggcgcagcgtagtccgtttatgatgctggcggaagaggtgccggaagcgcgcgatcatatgggacgctatgcgctggcggtggtacgccaaagcgacgactcttttgttctgctggcgaccgagcgtaatttactgaccttcaatcgcgcatcggcggaagagattcaggatcatagttgcgccattttgtcttcccgctgattttcgttacaccccctgttcattatcttattgattcttatcccggtttaaaaccggggtaagatcgtgtctataaaaatatgtgaaatcgatcaaaagatataaaggtatacctttatatcttttgatggttagttacactctcttcatagcctccatagattgtctggtggatggcttatataaaaacgtttttatttcatgtagtgacatcattaattgttcaccagatttgcgctgttaagcgtaaaggaatatcaacatgaaactttctatcgtggaaaaaatcggcttcggcgcgggagatatggcgataaacgttgtgattatcgccatgcagctgctcctcgcctatttctataccgatatctacggcctgagcgccgctgatgttggcgtactgtttgtggttgtgcggatgattgatgccattatcgatccggccatgggggttctgaccgataaactgaatacgcgctggggacgttaccgcccgtggctgctgtggtttgccattccttttggtttcgccgtgtatttgatgtttattacgcctgacatggcttatatggccaagctggcgtgggcctatggcacctatattcttatgaccctggtctataccgcgatcaccattccctatatttcgatgattggcgtgattaccagcgaccccgtcgaacggttaagcgccaacggttatcgctttgtgatgaccaagattgccgcttttctggtgactatcgtcgtaccgatgcttgccgtctggctggggcagggcaacaaggcgctgggttaccagttttcgatggggctgatgggggcgatgggcgccttgctgtttatcttctgttttcttaccacgcgtgaacgcagcgagccggaaattacgtcgttatcggtggggaaacagtttaaatatctgttacgcaacgatcagtggattattctcggcgttgttattctgctgctgatgtgcggttatgttattcgcggttccgttgccgcttattacgctaagtattatctgaacggcggcgatagcctgatttcacccttcctgactaccggcgtcgttgcctctattttagcgatgatcgctaccacctggataaccaagttctgggacaaaattaagatgttccgctacacccagattattacctttatcctgagcgcgctgatgtatttctccgtcgggcgtgaaaaccttgtcctggcgtttgccttctattttcttattaatttcttctgcgatatgcaaatgccggtgttctggtcctctatcgccgaagcggtggattacggagaaaagaaaaccggtctgcgcgtttccgggttggcgtttggcggcatcctcttcttccagaagtttgggatggggatcgcgggcgggatactcggattcctgctgagccactttggctatcaggccgatgttgaacagagcgcgcgttcgctcaccggtattgcgctgatgatgacgctcattccggctctgtttcaccttgcggttgggctgcttatgaaaaagtatctgattaataatgaatattatcgagatattcagcttgccctggcgcagaaacaggcataaggaggcgcaaatgaaggccatgaataaggtttgggttatcggcgatgcctccgttgatctggtgccggaaaaacagaacagctatctgaaatgccccggcggagcgtcggcgaacgtgggggtatgcgttgccaggctgggcggagagtgcggttttattggctgtcttggtgacgatgacgccggccgcttcctgcgccaggtttttcaggataacggcgtggatgtcacgtttctaaggctggatgcggacctgaccagcgcggtgctgatcgtcaacctgacggctgatggggagcgcagctttacctatctggtgcatccgggggctgatacctacgtttcgccgcaggacctgccgccgttcaggcagtacgaatggttttacttcagctcaattggcctcaccgacaggcccgctcgcgaggcgtgccttgagggagcgagacgcatgcgagaagccggtggctacgtgttattcgacgtcaacttacgcagcaaaatgtgggggaatactgatgaaatccctgaactgatcgcccggtccgccgcactggcttctatctgcaaagtctcggcagatgagctgtgccagctcagcggggccagtcactggcaggatgcgcgttattacctgcgcgatcttgggtgtgacaccacgatcatttcgctgggggccgatggcgcgctgttgattaccgccgagggggagttccattttcccgcaccacgcgtcgatgttgtcgataccacgggagccggtgatgcttttgtcggcggactgttgttcaccctttcccgcgcaaattgctgggatcatgccctgctggcggaagccatcagcaatgccaatgcctgcggcgctatggcggtgacggcaaaaggcgcaatgaccgctttaccgtttcctgaccaactcaacacttttctttccagccattcgctggcacaagccatgaccgtgaaataaggagtcatcatgcacgttgatcgaaacaaaatactgggatgcctggtgggcgccgccgccgcggacgcgatgggagccgcgacggaagtacgcacccagcagcaaataaaagactattttggcggctgggtgacgacctttcaaaaaccgccagcggacacgtttggccgctgcaacgaagcggggatgtgcacggatgattttattcaggcgaagtacatcatggatgcgctgctgcgccatcaacgccaggtcagcgacgaggcgatgcgcgaggctttccagcagtggctggattacccgtactacgccaactttaccggcccgacgacgcgtgcggcaatgaaggcaatattcaatgataaccgcgcctctttacagggtgagctggaaggcgagaaacagtcggtacagattattaataagggtaacgcggaggcaacgaacggcgccgccatgaagatttggccagcggcggtgctgcacccgggtgatattgacgcggcgattgaatgcgcgctacagatttgccgctttacccataataacgtgctggcgatgtccggcgcagcggcgatggcggcggcaaccagcgaggcgttaagagcgcagaccaatgcagacagcattattgccgccggtatttacggtgcgcaaaggggctatctgctggcgcaggagcaaggggcgatgatggtcgccgggccttccgttgcccgacgcattgagctggccgtagatatcggtaaacgtcatcgccattgggaaacggcggtggtggaacttgctgatattattggctccgggctgcacgtgagtgaagcggtgccggcggcctttggcctgttcgcgtgttgtccgaattctgccgtagatgctattatctccggcgttaatatcggcaatgatactgatactgtcgccaccatggtcggggcgatttccggcgcattccatggcgtggaggcttttcccgccgattatttaacgactttggatcgtatgaatcatttcgatttggcagaactggccaggcaaatcgcagggtagcgacttcaccctgccggggacggtaaaacgtcccctgctggcgaagacgtgaggtgcgcagcttgcaggttgataaaacgagctttactccgctttataagcaactattttttatcatctgtcagcagatccagaacgggtctttgcctttgggtagccaactaccgacgcaaaaagagattgccagatcctacaacgtctcgctgattgtggttaaacaggcctggagcgaattaatcaatgcgggcattatttcctcccagcgcggaagtggttcggtggtgtgctcggtgccggaaggcgtgagctacgggcacacgtttcgcggtattacccgcgatctccaggacgccagcgtggcgattgagaaccgtattctggaaatcgcgccgcgccgcgcgcgcgacgctcaggcagacggcttgagcctgcccgcacagcatcactatctctatatttcgcgtattcgttgcctgaataaccgcccatttaaccatgagaaaatatatctcgatctcagcttctttcccggcctggaactcacaccgcaggcgctggagcatacgtcgctttattcgttattaaacgtcacaagcgactcggcgatagaaaaagttgaggcgattttaccttccgctgacctgtgcgaaaaattgcaaatcgccgccaataaaccgctgttatccgtcgccagacagacgtttcaggccgggaaggacagcccttttgagtattgccgctattacgtgctgtctgaatactttggtgaaattcattatcactgatctgtccacttaatcctgcgataaccccaccatatctggcgtttacctgcctgactgtccgtcgtattcttgctgaaaaaatcgtcaggagacaggtatgtcgctctggttgtcccatcctctgttcctcccgtccatcatcgttggcgttactatccttctgtgggcgacttcgccactgccggagtttatgaccgcactgctattttttgctgtggcgatgggaccagggaaagttcctgcgcgggcggggatgctgtgatgtatcgcgctggcggtgatacgccaaagcgatggctcttttgtcctgctggcgaccgagcgtaatttactgatcttcaatcgcgcttctgccgaggaaattcaggatcatcagtgtgatatcttgaaccaacaggtcatcaaatgacagcttgatattgcattaacgaataccgtttggaggccggacaaggctctcgtggcgctatccggcaaaatctggcgatggcgcgggcgttaccaggccggtggatctgcggggtggctgtcattttccagatgcggcgatttaataaacacgcctttccagggtttatcgccgttattaatgagataatgcgcctccccaggttcgcactgtaaaacatctccagtttgcaggatatgaggtgttccttccagatacaggcacacttcaccgcttagggtataaaaaatctcacaagcggtattatggcgatggttagggaatgactgccctggttgtagtatgacgacgcccatatcgcagcccggcccacggattaagtatttagggccattatcgccaaagcggtattcatgattcttctcattcgttttttgcatgcttattctcctgttacaggcctggcgctttccagagggatgtcgttaagccaccatcgaccagcgcgcgttgatcctgataaacggcctgccatttttctctggcctgctgatagacagcgaaattttcaggattaggtttatgctcccgatcccagcgcactagcttttctcccgtttccgccagcgatggccagacacccacgccaacgcctgcggcaatagcgcaccctagcgcggtagcttctttgacgacaggtacgtgaacggtgagtcccgtaacgtcggcaaggatttggctccataatttgcctttagatcctccgccagcaaaaaccagcgagtcggcctgtacgccggaaaacgcggcaatttgctgtaaattgcaggcggaaacaatggcggcattctcttccagcgcgcgaaatagggtcgctttattacacttttcaggatcgatagacagattgataaacgacggcgcggcatggtaccagcgtttaaaacgcataacgtcagagaagatgggcatcacaccgtacgcgccgggaggcacccggctggccatatcttccagcagggaatacgcatcaatacctaacctttcagcgattagtttttcctcggcgcaaaaggcgtcgcggaaccaacgcatcgttaacccagtaaaaaagctaatagactcggtttgtaccataccggggatcacatgaggattgatgcgaacgttcatgtttgggtcggtgaccggcgcgggaagattgacgacctgttgccagaaggttccgcccagcacggccgtttgcgccgggcgtacgacgcccagccccagacagcctaactgcacatcgccgccgccaacgatgaccggcgtacccgcttgcaggtcgcactgttcagccgctttctgtgaaatgtgaccgagcagcgtcccggtttcttttaccggcgagagaatgtcagaacgcaggcccgccatctgtaacagactacgtttccagttgcgggtcaccagatccaataaccccgtcgtgcctgcgttggagggatcgaccgccagttcgccgctgagcataaaggccatccagtcgctgatcatagtgacggttgacgcgcgatgataaatatccggacgatggtgggcaagccagagcagacgcggaatagcgctgagcgccagcgtttgcccggagcaacgataaacttcctcctcaaaggtgttatcgtacagctcttttaattcactgacttcgtgcgccgcgcgggcgtcaacattagcgcaggcccaaattggttcgccgttactgtcataaataacaatgccttcacgcatcgagcaggccgatacggcagcgatagccgttgcagggatggcggctttctgtagtgcctgacggatacactggcaagccagttgccagtttttggcaagatcaaactccatcgaaccaggcacatccggcacggccagatgctgccattccgcttgaccgacagctatttgctttccttgtagatcaaaaattactgctctgacgctaccggtaccggcgtcaagagccatcaggtaatgtcctgattcagtatgggtacagagtcgagccatttttttatcctcggctatttttacatcgttacataaaatcctgtcagttattgtttattgaattgaggtaagtgttattttatttttttatttttcaataatttgaattattttccctgcggttttctgatcggtaaccagtgcattgatatagttaccgcgcatagcggcaataatagcttctgctttttgttcgccgccggcgacgccaatcacggttgggatcgtggaaagtgaatttaacttcaggccaattaattcgttatggattttgatgtctggaataatttcgccatgagcatcaaaaaaatagcccagaatatcgcctactgcgcctttgcggccaatcatgagttgttcaccctgagtgatataaccggattttaagatactggcttgatctttctggttaattgccccaatccccacgatggcggcatcggcagcttgcgctgtgagcatcacatcccgcacgctattttcattgcgcagcgtgcaggcaatttcctgcgatgatgcgcgcagcggcgcgggcataatacttacgctacaagcggcatcaagctggcctattccggtcatatacggccccacgccgccggataacgtgaccagtcggatttgttgcgccgagataaatccgctgaggcgttttaatgtggtcatcgtggcttcgccaaagccgacggccagcagttgctgtggccgcagtgactccatcaacatatgggcggcgccgattcctaagcgcagaccaatatcggcatcgggtaatgccggcagcacgcggatattctgcaatgcgaagtggttgcgcaaggcattttcatactcaagacacccttcgaagcgggagttgatttgtacgcgaataataccggactgatgccctttctccagcagacgagaaacctttagccgggttagccccagacgctcgctgatttcactctgcgtcaatccatcgtgatagtagaaccaggcaatacgcgccacctgctcttcttcgcacattccataatcagataccaacgtattatcgctcattgtcataacctggctttactttgaacatttctaaatcattaacacaattgttcagttatcactccgaaataaccgtgattaacgccacaaaaacgcgccaaatctgaacatttatcatctaaaaattcatttattcagaaaacgtgatctggatgagagttttttgaccaaataactactaccgttttgaacaatttctttttcaaaaaacatttgttcagtcccgtcagtcaacattgagggagcggaggcaacatgcaaatcagtcacaatactgcatcccctctgatttgtgtgcagaacatttataaaagttattccggcgtcgaagtactaaagggaattgactttactctgcatgcgggagaggtgcacgcattgcttggcggcaatggtgcgggtaaatcaacattaatgaagattattgccggtatagtcccgccagatggagggactatcgatattgctggtgtgcgttgcagtcatttaacgcctctgaaggcgcaccagtatggcatttacctggttccccaggagcctctgttatttccgagtttatctgtgcgggaaaatatcttgtttggcttgcagggacgtcaggcctccacggaaaaaatgcagcagctattaaaggcgatgggatgccaactcgatccggcgagcgctgcgggtacgcttgatgttgcagaccgccagatcgttgaaattatgcgcggcttgatgcgcgactcgcgaatcttaattcttgatgagcccacggcgtcgttaacgccagccgaaactgatcggttatttacgcgtctgcaagagttgctgaaaaagggtgtcggaattgtatttatttctcataagctaccagaaattagacagttagctcactgcgttagcgtgatgcgtgacggtaaaatcgcattattcggaaaaacgcatgacctttctaccgacgagattattcaagctatcaccccggcaacgcagggcgtcagtctttccgcgaatcaaaagttgtggctggaattgcctggcagccgcccgcagaacgaacgcggcgcgacagtattagcgctggagtcactgacgggcgaaggttttatgaatatcaaccttgaggtgcgggcaggcgaaatccttggtctggccgggttggtcggcgcgggacgcacagaactggctgaaacgctgtacggtattagaccggtcaatgcggggcggatgctgttcaatggtcaagaaattaacgccctgacaacccaacagcggttgcagctcggcctggtctatttgccggaagatcggcagtcatccgggctgtatcttgacgcttccctggcatggaatgtctgttcgctgacccacaaccaaaaaggattttggataaagccccagcgggataacgccacccttgaacgttaccaccgcgcgttaaatatcaaactcaataatgccgaacaggcggcgcgtactttatccggcggtaaccagcaaaaagtattgattgccaaatgcctggaggcctctccgcaattactgattgtcgatgaaccgacccgcggtgtcgatgtctccgcccgcagcgatatttatcagctgttgcgcagtatcgcgcaacaaaatgtcgcggtgctatttatttcctccgatctggaagagatagagcagatggccgatcgcgtatatgtcatgcaccagggggaactgggggggcctgcgttatgcggcgaggaaattaacgttgataccatcatgcacgttgcgtttggcgaacatggtgcgtcggaggcaacatgttgaaattcatccaaaataaccgggaagcgacggcactgctggcaatagtctgtttattcgtgtttcctggcgcgctggatagtcagtatttgagcgtgcaaacgctgacaatggttttcagtagcgcgcaaattttgatgctgttggcgattggcgcgacgatggtaatgctcacccgcaatattgatgtatcggtgggctcgacgacaggaatgtgcgcggtattgctgggagtgatgttaaacgccggctatagcctgccggtcgcctgcctggccacactaatattaggaattgtcgccggattttttaatggcgtactggttgcctggttgaagatacccgccattgtcgccactctgggaacgctgggcttgtatcgtgggatcatgctgctatggacaggggggaaatggattgaaggattacccgcaggcttaaagcaactctctgctccggtgtttctgggaatttccgcaatcggctggtttaccctggtgttagcgctgcttatggcctggctcctggcgaaaaccgcctttggccgcaatttttacgccaccggcgataacctgcagggcgcccggcaattgggtgtccgtaccgagatggtacgcatcatggcattttcacttaatggcggtatggcggcattggctggaatcgtgtttgcctcgcagattggcttcattcccaatcaaaccggcacggggctggaaatgaaagccatcgcggcctgcgtattggggggaattagcctgttaggcgggtcaggcacggtcatcggcgctattctcggcgcttattttcttacgcaaatcgatagtgtgttagtgctgctgcgtatccccgcctggtggaacgattttattgctggcctggtattgttgggcgtactggtattcgatgggcggctgcgttgcgcattacaacgcaatctgcgccgccagaaatatgcccgttttatatcaccacccactccactacagacggaagcaaaaacgcacgcacaacagaataaaaacaaagaggtggcatgatgaatccatggcgacgctatagctgggaaattgcgctggcagccttattgatctttgaaattctggctttcggtctgattaatccacgtttattagatattaatgtcttactttttagcactagcgattttatttgtatcggtattgtcgctttgccgctaacaatggttattgtcagcggtggtatggatatttcatttggttctacaatcgggctatgcgcgattaccctgggtgtgctgtttcagctcggtatgccgctacctttagcgattattattaccctactacttggcgcaatatgtgggctgataaatgccggacttattatttataccggcgtaaacccgttggtgattaccctgggaaccatgtatttatttggtggtagcgcattattgttatctggtatggctggcgccacgggttatgaaggtattggtggatttcccacagcgttcactgactttgccaatatttcatttcttggtattcccatgccgcttattttttttcttgtgtgctgtctgtttttctggctgctcatgcatcgtacgcatatgggacgcaacgttttcctgattggccagagcgcccgtgtcgcgcagtacagcgcgatcccggtgaatcgcacgttgtataccgtgtatgccatgaccggatgcgcctccgcgatcgccgccgtattactggtttcttactttggctccgcacgttcggatctgggcgcctctttcctgatgccggccattacggcggttgtgctgggaggcgccaatatttatggcggctccgggtcgattatggggtccgcgttggcggcgctgctggtgggatttttacagcaggggctacagatggccggagtgccgaatcaaatttccagcgcattgtccggtgcgcttctcattgttgttgtcgttggtcgttccgtcagtttgcatcgtcaccaaatccttgaatggtactcacgccgtcgcaatgcgcatcaggcatgatttccttttgaaatttatggagaaaaaaatggcaagacacagcattaaaatgatcgccttactcactgcgtttggtctggcatctgcggcaatgaccgtgcaggcggcagagcggattgcttttattcccaaactggttggcgtgggcttttttaccagcggcggcaatggcgcgcaggaagcgggaaaagcgctgggcattgacgtaacttacgatggccctacagagcccagcgtctcaggccaggttcaactggtgaataactttgtcaatcaggggtatgacgccattatcgtttctgccgtttcgcctgatggcctgtgcccggcgttgaagcgggcaatgcaaagaggcgtgaaaatattaacctgggattccgataccaagccggagtgccgttcttactatatcaatcaagggacgccaaaacagctcggcagcatgctggtagagatggccgctcatcaggtggacaaagagaaagcgaaagtcgctttcttctattccagcccaacggtgaccgaccagaaccagtgggtgaaagaagctaaagccaaaattagccaggaacatccggggtgggagatagtcactacccagtttggctataacgatgccacgaaatcgctccagacggcggaaggtatcatcaaagcgtatcccgatctggatgccatcatcgcgcctgacgctaacgctttacctgctgcggcacaggcggcggagaaccttaaacgcaataatctcgcgattgttggttttagtacgccgaatgtaatgcgcccttatgttcagcgcggcactgttaaagagtttggcctgtgggatgtcgtccaacagggaaaaatttccgtatatgtcgccaatgcgttgctgaaaaatatgccaatgaatgtcggtgattcactggatattcccggcatcggcaaagtcaccgtttcacctaatagtgagcagggatatcactatgaggcaaaaggtaacggcattgtgttattgccggagcgtgtcattttcaacaaagacaatatcgacaaatatgatttctgataactgttatgtatcgacggagtaaagaatggctgatttagatgatattaaagatggcaaagattttcacaccgataaaccacaaactaacactttgttcgcattaaaaggctgtggcgcgctggattggggaatgcagtccagactggcgaggatttttaatcccaagaccagaaaaacggtcatgctggcctttgaccatggatatttccaggggccgacaaccggacttgagcgtattgatatcaatattgcgccgctctttgaatatgctgatgtcttaatgtgtactcgcggcatattacgcagtgtggtacctccggcaatcaataaaccagtcgttttacgcgcgtccggggcgaattctattctcactgaattaagcaatgaggcggttgcggtggcgatggatgacgctgtgcggttgaatagctgtgctgctgccgcacaggtttatattggtagtgagcatgaacatcagtcgattaaaaatattattcaactgattgatgccgggttacgcgtcgggatgccaataatggcagtgaccggggtgggtaaagatatggctcgcgaccagcgttatttttcactggcaacgcgtatcgctgcggaaatgggggcgcaaattatcaaaacgtattatgtcgataaaggttttgagcgtattgcggcaggttgtccggtgccgattgtcatcgccggcggtaaaaaactgcctgaacgtgaagcattggaaatgtgctatcaggcgattgaccagggggcttctggcgtagatatggggcgtaatatattccagtcagaagatccggtagccatgattaaagcggtacatgctgtcgttcatcataacgaaacagcagagcgtgcttatgagctgtttttgagtgagaaaagttaaatgagatcgcttccccatcttttaccgatgcgaggagatggggatgactgttattttatttggaataatcagggggttaatgatgcacgttacgctggttgaaattaacgttcatgatgacaaggttgaacaatttatcgatgtttttcggcagaatcatctgggctcaattaaagagccgggtaacttgcgttttgatgttctgcaggatccgcaggtgcttacgcgattttatatttatgaagcctacgttgatgaacaggccgtcgcttttcacaagacaacgccacactacaaaacttgcgtggagcagcttgaaccgttgatgaccggtccgcggacaaaaaaagtttttatgggtttgatgccttaaggagcgctcatgaacagccagtttgccggattaacgcgcgaagcatgtgtggcattgttagcgtcatatccgcttagtgtgggtattctggcagggcagtggattgcgttgcatcgctatctgcaacagttggaagcgctaaaccagccgctgttgcatttggatttgatggatggtcaattttgcccgcagtttaccgttgggccatgggcagttgggcaactgccgcaaacctttatcaaagatgttcatttgatggtagcggatcaatggacggcggcgcaagcctgcgtgaaggcgggcgcacactgcatcacgcttcaggctgaaggcgatattcatctgcatcatacgctaagctggcttggtcagcagaccgtgcccgttattggcggtgaaatgccggtgatccgggggattagtttatgcccggcaacgcctctggatgtcattatccccattctgagcgacgttgaggttattcaactactggcagtaaaccctggatacggcagtaaaatgcgctccagtgatttgcacgagcgcgtggcgcagcttctctgtctacttggtgataaacgcgaaggtaaaattatcgttattgatgggtcgttaacgcaggatcagttgccttcgctgattgcacagggcatcgatcgtgttgtttctggtagtgcgttatttcgtgatgatcggctggttgagaatacgcggagctggagggcgatgtttaaggttgccggggatactactttcttaccctccacagcataaatgccggatggcggctttaccttatcaggcctacataagcactcggctggtaggcctgataagcgcagcgccatcagacattgattggcaattaagcctgtttagcagcttctgctgctttcacgatcaccgcgaaggcgtcagctttcagagaagcgccgcctaccagtgcgccgtcgatgtccggctgcgcgaacagttcggcggcgttggaggcattaacagaaccgccgtactggataataacctgttcagcgattttcgcgtcagctttagcaatgtggtcacggatgaatttgtgcactgcctgcgcctgcgcaggagttgcagatttaccggtaccgatcgcccatacgggttcgtaagcgataaccgcgccttcaaaggctgccgcgccctgcgttttcagtaccgcgtcgatctggcgtgcgcatacttcttctgttttgcccgcttcgttttccgcttcggtttcaccgatgcacagtaccggcgtcagaccttgttctttcagtacggcgaattttttggcgatcagctcgtcagattctttgtgataagtacgacgctcggagtggccgataataatgtactgcgcgccgatatccttcagcatttcagccgaagtttcaccggtgaatgcgccagacagattcagatcaacgttctgcgcgcccagcatgatgtggctgccggcagcagcgcgtttcgccagatcgatatacatttccggcggagcgattgccacgtcgcagcctgctacgcccgtcagttctttacgcaggttagccaccagttcgtttaccatgtggcggctgccgttcagtttccagttacccatcactaaaggatgtcgcatttcatttctccacgcttagtcagcgaattaaggaagatggccgctcgtcagagcagcatggtctgtgaaacagtatagagattcatccccggaaaggctttgctttttgtcatcaattcgccccttccagattttcagataacgtcagcttaatcggttcaaccgcgaaggtcagccccttttcgccgttatctgcgacaacataacgtaccgcgccttcggtctcggcgtaatagtgtttacctttaccggcgataagcatcttttgcagttttttctggctttgctcttttgtcagtaacggggcgacagtgcgaataatggcggccatatattccagcgctttcgctttcgccgctttctgttccggcccctgaatgggcagccaggtaatctgcatacttttcactttgagcgtaccgcgctccagcgccgtggaggcatacagattttcgttaatcttactggcggcgcgggtcagattcgccttatcgcggctattctcaatggcgcgaaattcattgagcggcagatcgggattctggcggttaaagttctcacgaaactggctaatagaaagatcaaaggttggcgagcccgccagcagatagggcgctgtcgtggtcgatgaagagagctgcgcgtgcgccgttatgctggcggtgagagcagaaaacaacagtaaaaacagagtacatcctggcttcatcaatcttacctttcgttaggactgctcacgattaaaacgataactgtcgggcttgtcaaaagggtaaactgtagcggaaggcaaaatataaggaacttacatgaccatacagcaatggttattctcatttaaagggcgtatcggacgccgtgatttctggatttggatcggcctctggtttgccgggatgctggcgctattttcgctggcggggaaaaacctgcttgatatccaaacggcggcattttgcctggtgtgcctgctgtggccgaccgccgccgtcatggtcaaacgtctgcatgaccggggacgttccggcgcgtgggcgttgctgatgattctggcgtggatgctgctggccggaaactgggtgatgctgccggggatgtggcagtgggtcgtcgggcgatttattccgacgctgatcctggtgatgatgcttatcgatctgggcgcgtttgtcggtgttcagggggaaaataagtttgggaaagcgacacaggacgtgaagtttaaagcagaaccgtaaacgggcggtaaaccgtaatttgcccggtggcgctgacgcttaccgggcctacagattggtgatgatttgcaggccggataagccccagccgccattcggtaaaacatcaccagtaatgttcagccgtcatatgccccggtcggcggcgcagatgtttagtcatctgtcgggtctctttcagcagttgctgcgtatcgcgcaccatctgcgggttcccgcacagcataacgtggctggtctctttatccatcggcaatccaacggctttttccagctcgccgttttcaatgagcgctggcacgcgtccagtaagcgagcctggcacgttctcccggctgaccaccgtttggatgcgcagcttgccttcataacgctgttgcagttccagcattagcggcagatagcttaaatcggcggcgaagcgtgcggcgtggactaagaccagatttttaaagcgtgcgacatcctggccatattgtagaatagacaaatacgggccaatagcggttccggtcgccagcatccatagcgtctcgcagtcaggcacttcatccagtacaaagaaacccgacgcgtcgctgaccacttgcacctcatcgccaggttttagcgccgccagccgcgggctgagctttccttgcggcaccgtcaccagataaaactctaaattcggattgtcaggcgcattgacataggaatacgcgcgctgaacgcgctcgccatcgatctccagtccgagtttggtaaattggcctgcagtaaaaggattaatgggggcgtgaacggtcaggctgaacagtgcgtcagtccagttttgcaccttagtgactttacctgttacccaatcggccatggttttctcctgttctgaatcgctaaccttatcttcgttcgtcaggagaaagatttccagccccgcgaggctggaaggctctaactaacaaatgcgctagagaatatgcgcctgcacatccggatctttacgatcaagatagtggatagactgaatgcggcggatggtgcgtgatttgccgcggatcagcagcgtttccgtcgtggcaatatggcctttccggctaattccttccagtagatcgcctttcgtgatgccggtcgcggagaaaataacgttatcgctacgcgccatgtcgcccaggcataacgccttgcccgcttcaatgcccattgctttgcagcgcgccagttcctgttcgccaatgcggcggttttcttcgctgttgcctttcacgtcatggcgcgccagcagacgcccctgcatatcgccgtccagcgcgcggatcaccgctgcggataccacgccttctggtgcgccgccaatcccgtacagcacgtcgacttcgctatccggcatacaggtcagaatggaggccgcgacgtcgccgtcaggaatggcaaacacgcgtacgcccagtttggccatctctgcgatgacctcgtcatgacgcggttttgccagaatggtcacggtcaaatcgccaagcggtttacccagcgcatccgcgatgttgcgcaggttatccgccagcggcagattgagatcaattgcccctttggcgcccggaccgacaatcagtttttccatatacatatcgggcgcattcaggaaacagcctttatcgccgaccgccagcaccgccagcgcgttcgcctgacccatcgccgtcatgcgcgtgccctcaatcggatcgacggcgatatctaccgcatcgccgtggccggtaccgactttctcgccgatatagagcatcggggcttcgtcgatttcgccttcgccaatcacgatggtgccgtcaatgttgacctggttgagcatgatacgcatggcgttgaccgccgcgccgtccgcggtatttttatcgccgcgtcccagccatttgtagccagccagcgccgccgcttcggtcacacgggaaaattcgatggcaagttctcgtctcataacaaactcgtagcaaaaaggagtggcgcgcagtgtagcacaggggaaggagggaataattgatgtgtgtgcggagttgcctccgcacaaagattttgccggatggcgaccttacttgtcgtgctcttcccacgccattgcgcgtttaaccgctttcttccagccgctgtaacggtagttacgctcggtggtttcaatgccggggcggaattctcgctcaatgacggctttttcctgcagctcgtccaggttctgccagtaaccgacggccaggccagccagataggcggcgcccagcgcggtcacttcgcgcacttccgggcgttccacccgcgtgccgagaatatctgactggaactgcatcaggaagttgttggccactgcgccgccgtccacacgcagagcgtgcaggcggataccggagtcggcctgcatcgcttccagtacgtcgcgggtctggtaagcgatggattcgagcgtcgcgcggataatgtgattagagttcacgccgcgggtcaggccaaaaatggcgccgcgggcatacgggtcccagtacggcgcgcccagaccggtgaaggccggaaccacgtagacaccgttggtatctttcactttcgtggcgaaatattcggagtcgaacgcgtcgctgatgagcttcatttcatcacgcagccattgaatggacgctcccgccataaacaccgcgccttccagcgcatagttgacttcgccgcttgggccgcaggcgatggtgatcagcaggccgttttccgattttaccgctttctcgccggtgttcatcagcataaagcagccggtgccgtaggtattctttgccattccttcctttacgcacagttgaccgaataacgcggcctgctgatccccggcaatcccggcgataggaatacgtgtaccgcctttaccgccaatattggtctggccgtagacttcggaggacttacgtacctggggcagcatcgcgcgtgggatatccagcacgtccagcatcttatcgtcccagtccaaatcatggatgttgaacagcatggttcgtgaggcgttggtgtaatccgtaacgtggacgcggccctgcgtcatcttccagataagccaggtatccaccgtaccgaacagcagctcgccacgcttcgcgcgttcgcgcgaaccttccacatggtcaaggatccatttcactttagtgccagagaagtacgggtcgacgaccagaccggtattgtcgcggatgtaatcttccaggccgtcgcgtttaagctgttcgcaaatatcggcggtacgacggcactgccagacaatagcgttgtatatcggtttgccggtttcacgttcccagacgatcgcggtttcacgttggttggtgataccgatagcggcaatctgatcggaactgatatcggccttagccagcacttctaccagcgttgagctttgggacgcccaaatttccatcgggtcgtgttctacccagcctggcttaggataaatttgctcaaattcacgctgtgatacgctgacgatattcgcgtcatgatccataacgaccgcgcgggagctggtggtaccctggtcgagcgcaacgatatattttttttcagtcataattttgtcccgtaatcagattacagcgaagcattttgttgtgtggtcgcggtggagtccttctcttccacgacgcaggtatcgcacggcaaatgacggccaataaatttgcgataagcaaacgcgcccagaatggcgccgacgatggggccaaacagcggcaccaggaagtaaggaatgtctctaccgccggtaaacgcaatttcaccccagccggcaagcccggcgaacattttggggccaaagtcacgcgccggattcatcgcaaacccggtcaacggccccatagaggcaccgataacggcgatcagtaaaccaatgagcagtggcgcaagcggaccgcgaggtacgccgtttccgtcgtcggtcagcgccagaatcagccccatcagaatagcggtaatcaccatttcaaccgcgaaggcctgcacaaaattgatatgaggattcgggtaagttgagaaaatgcctgcgagatcgagactttcaacgctgccacggacgatatggtgggtttgttcgaagtccacaaaaagattgtaataaagcccgtaaactaacgccgctgcgcaaaaggcgccggcaacttgagaaataataaaaggaacaactttacgtttgtcgaaacaggcaaatagccagagtgcgatggtcactgccgggttcaggtgtgcgccagaaacacctgccgtcaggtagatagccatcgctacccccagaccccagatgacgctgatttcccactgtccaaaagtagctccggcaactttaagcgcagcgacacaacccacaccgaaaaaaatcaacaacccggtaccgaggaattcagcaatgcactggccttttaaggttgatgtttgactcataatcggatcctgaagagtatgtaatgattattggtatgcgaggaggtcatggacatccacgatgccctgtaggcacactgttaatttatcgttaacgagcaaaaacgagaaatatcgaaatcaaaatgtgtgtactgcgtcaataaaatgagcgttatcgcgccatgaagcgcattttgagacagcagaagagagtgaattgaatcatttcattaaccaatatgttaacacttttaagttattgaatgaatgttaccaggagatggatgaaaattgctgcaaaccgcgatctacgcggtatgtcgctggacagcgagagcggggcttcatacaatcgacactatatattgtgcgcgtttacgtgaagcgtcgccttgcaattcaggagaggtaagatcatgtctttagaagtgtttgagaaactggaagcaaaagtacagcaggcgattgacaccatcaccctgttacagatggaaattgaagagctgaaagaaaagaacaacagcctgacgcaggaagtgcagtctgcacagcatcagcgtgaagaactcgagcgtgaaaataattctctgaaggaacagcagagcggctggcaggaacgtttgcaggcgctgcttggtcgtatggaagaagtctaatcctcgtcatatttcacgttatggcggcgttggctgcgtgcgttcaccccagtcacatagtggcctatgctcctggggattcacttacttgccgccttgccctgacgcgaaatctatagaggatttagaatgcggataccggtgggccggataaggcgtaagctgccatccggcaatcagcgacaacgcataaaaaaggcgccttacggcgccttttttgatcactcgatatcaagcgggtcttcggaaaggataatcccggtgttgtcggcatagagatgatcgccggagaagaacgtcacgccgccgaaattgacgcgcacatcgctttccccaatgccttcacctgcggcgccaaccggaatggcggcgatcgcctgaatgccgatatccagctcttccagatcgtccacctgacgcaccgcgccatagataaccagcccttcccattcattttgcgtggccagacgcgccagctccgcatcgactaatgcacgacggacagaaccgccgccatcgaccagcagaacccgaccacggccattttgttcgagcagatcgtacagcaacccgttgtcctcgaaacattttaccgtgatgatttgtccgccaaacgacgaccgccctccaaaattagagaacagcggttccacgacgttgacatcttcctgatagatgtcacaaagctcggaagtatcgtatttcataggcttaacgttcagttgctgcgagaatttttagtatatcgcgctaagtatactgttggcaaaatcatcaattgttaattgatatttgtcagttaaacggcccactgacttaagagtatcccaatcacaaataacaggttggttaacaacgcgcctttaacggtacgttcaagcatcgggcgcattgccgcaggctccctttcgcgcattacgtagcgcgcttgtttaatgagcaagggcgcggccagaataaacaaccatccccacggactgtgtagcgagagcagattaaacagcgccagacagagcagcgcgcctagcaacaggcaggcgtgataacgacgcgcgttgacatcgcccagtcgtactacaagggtgtttttgccgttctctctgtcgctattaatatcgcgcaggttattaatattcagcaccgccgtcgccagtaaaccgcaggcggtggccgggagaatcagcgccggaatcagcgtatgcgcctggagataccagctccccatgacacttagccagccaaagaataccaggacagagatatcacccagcccgatatagccgtagggccgattacccacggtgtaggtgatggcggcgataatcgacagcccgcccaaaatcaggaagccgacaaaatcggttaacgtatggcacgcgaccgccaccagcgccagtccggagatacagatcagcacgacggtaatgattaacgcccgcttcatctcctgtcgggtgatgacgcctttttgcatcccccgcagcggcccgatgcgatccggtttatcgctgcctttgacagcgtcgccataatcgttggcgaggttggataaaatttgcaacagcccggcggtgataagggccagcagcgcgaccagaggatcgaaatagccttgccaccatgccagggccgtaccgacgataatcgccgcgaaggcgaggggtaaggttttgggtcgtaagctttccagccaggcctgggtgcggctaatttgttgttgttcagtcatatttagcgccaataaaaatggggcttttcagccccatcaacagtgatgaaaatgcattggacgcgattataagataaaacggcttagatcttcatctgcgaccagcgcatccagatgtttgctcacatattccgcatcaattgtgatgttttggccgtgcagatcgctggcgttataggaaatctcttccatcagacgctccagtacggtatgcagacggcgcgcgccgatgttttcggtggtttcgttaacctgccaggcggcttcggcaatacgtttaataccggaatcggtgaactcgatattgacgccttcagttgccatcagcgctttatactgcacggtgacggaggcgtttggctcggtcaaaatgcgttcgaaatcgctggtggtcagcgcctgaagttcaacgcgaatcggcagacggccctgcagttccgggatcagatcagacggcttcgccacctggaacgcgccagaggcgataaacagaatatgatccgttttgaccatcccgtgtttggtcgaaaccgtgcagccttctaccagcggcagtaagtcgcgctgtacgccttcgcgtgaaacatccgggccggaggtttcgccacgcttacaaattttgtcaatttcatcgataaacacgatgccgtgctgttcaaccgcgtcgatagcgtcctgtttcagctcttccgggttgaccagtttagcagcctcttcttcaaccaacagtttcatcgcgtctttaattttcagcttacgcggtttctgtttctgaccgcccaggttctggaacatagactgcaactggctggtcatctcttccatgcccggaggcgccataatctctacgcccatcggcgcggcggcgaggttaatctcgatctctttatcgtcgagctggccttcgcgcagttttttgcggaacgtttgacgggcggcagaaggctcctgctgctgttcggcctggccccagttattttttgcgggtgggatcagtacgtcgagaatacgttcttccgccaactcttccgcacgatagcggtttttctcgatagcctgtacgcgaaccattttcaccgcggcatcggtcagatcgcggatgatagagtccacttctttcccgacatagcccacttcggtgaatttggtggcttcgactttaatgaacggcgcgttggcgagttttgccagacgacgggcgatttcggttttaccgacgccggtcgggccaatcatcagaatatttttcggcgttacttcgtggcgcagctcttcatcaagctgcatacgacgccagcggttacgcaatgcaatcgccacggaacgctttgcgttatcctggccgataatgtgtttgttcagttcgctgacaatttcgcgtggggtcatttcagacatgagaggtccttacgctttggcggtcaattcttcaatggtgtggaaatggttggtgtaaatgcagatatcgcctgcaatatccaacgccttttcagcaatttcgcgcgcgccgagctcggtattttccaacagagcgcgagcggcagcctgggcataaggaccgccggagccgatagcaattaaatcgttttcaggttgcacgacatcgccgttacccgtgatgatgagcgaggcggtttcatccgcgacggccagcaacgcttccagtttgcgtagcatacggtcggtacgccagtctttcgccagttcaacggcggctttgaccaggtgcccctgatgcatttccagtttacgttcaaacagctcgaacagcgtgaatgcatccgcagtaccgcccgcaaagcccgcaatgaccttgtcgttgtagaggcggcggactttcttcacgttgcctttcattactgtgttacccagtgtggcctgaccatcaccggcgattaccacgtggccgttacggcgtacgcttactattgttgtcacgagcagaccccttggttactaatgctgaattgcggccccgtacggcgtacggggcataatgcaagtatagatgggggagattttgagggtttcaacccccggtggcgagtcgaatgcagtttgtatggcccgccatcttcagacggttaatggtgctgtcggcattttctttacctttcaccggcccgataaccacgcgattccagccgttattggtggtaattttggagtcaaagccttcaaacgccagctgagcgcggacgctttctgcctgctcggcgcctttgaatgaaccacattgcaccatccagcgacgttcatcttttttctctgctgtcgccttcggcgcttcaggcgcgcgcgtaatgggcgcggcttttggcgctgccgcgctggtatgcgccggcgtttgcagcaaatcctgataaggttgctgcgaggccgtctgcttcggcggctgactttggcgcgcgggttgcgccggggcggactgtaccgtgcgcgtttgcggctgttcgtttacccgcggctgcgtacgtggttgctgaacaggctgcgtttgagcccactgctgctgctgcgcctgacgctggcgctgtagcgtttgctggcgttgttctggcgtctgctcgttccacggcacttcgttaagttgcgtcggctgctgacgcatatccgcctgcatctgttccaggagttgacgctgctcgctggtgagctgattcggattcatgacttcgccgccggcggacggttccgttggcgtacgcacgcccggctggcgactttccagctctttgatgtaacgccagcgctcttccggttttggcggaagcccattgccggtgactttctggttttgtagcgtttcggactcttctttcttatggtgagtaatgaagtacagaccgccgataaaggtcacaaggacggctgccgcaatcgcgaccattgccggcgagacggcaggcatgttgctttgcttcttccgtgagttccgtgaggtgctctttttgcgccgcgaaggagccggttggccgcgacgtacataatctcgttgtgccactatcgtttcgctgtatttattcgttcgtcagcccgtcatgttactgaagcggcgggcctttgaccagacaggtgagtcttaaagctatttactttagggtaaagcgcgcgtagaaccgcgaataatcagctcgcaatccattaaacgcgagccgctgctcacattttgcccctgcatctgatcgagcaacaacagcatcgcctcgcgaccaatgtcaaaacgcggctgcgccacggttgtcaacggagggtcgcaaaactcggccagcgcgatattgtcaaagccgataatcgacagatcgtcaggcactttcagaccctggcgcttggcccaggagagggcgcccagcgccattacgtcgctatgacaaaagacggcggtaggcggcaacggttgctcaagcaactgctttaatgcgtttgccccggcttcaaaggtaaagtcgccacgggcgatgtaatgcggatcgaccacaatgccactgcgtcttaatgcctgtacgtaaccttgtaagcgatagtgacagagcggcatatcttccggccccgcaatacaaccaattcgcttgtggcccaaatccaacaggtagttcatggcattgaacgcggcggtgaggttatcaatatgtaccgtcggcagttcaagctccggcgcgaactcattcgacatcaccatcggaggcaaattgcgctgctcctcaacgctggcgtcaaagggcagtcgggaactgagaagtaccatgccgtcgatctgtttggtgatgatgagattaagaaaggttttttctttctggttttgatgggcgcaatcgccaatcagcaccagatacccctgttctgccgcggtcacttcgataccgcggataatttcactgaagaagggatcgcaaatatccgggacaatcaccaaaatcgtacgggattcattgcgttttacatttcgccccatcgactgcgggaaataacccacttcaagcgcggcctgttcaacccggctacgggtcgactgggagactttatcggggttcattaacgcgcgggatacggttgccgtagagactttcgccttcaacgcaacatccttcatcgtagcggcagtaacctgcttgttcgatttcactctttctcctcgcctgggaactgctggcgcagatctatccctggtaacactcatcgaaaacatttttatcagatagtgcgtggaagcggttacagaattttcataaaaagtgtgatggatctttaattttacgatccgcctcgcatcgtgaggactatccttcaatcggatcgacgtccagaacccatttaactttccgcgcttccgggagcgtattgatcaacgccagcgtgccgctgatgatgtgttgcaggcgaatccgtgaaggatgctgaagtaaaatttgccagcgatagcggccgccgcgttttggcgcgagggccggaaccggacctaagatccacagcttatcgtctgatagcgggctggcctgaatcagattacgcaactgttggagaaagacgggcgcctgctgattgttatgatcctctgcgcgaataatgacgtggctggtccacggcggaagctggagcgtttgccgttccgccagcgcctgctccgcaaacgcatcatagcctttatacagtaacgtttgcagcaggggatgctcaggatggtgcgtttggagcaccacttcgccctgtttgcccgcgcgcccggcgcggccggaaacctgagtgtagagctgggcgaagcgttccgccgaacgaaaatctgcggaaaaaagcgcgccatcgacatccagcaacgccaccagcgtgacatccggaaagtgatggcctttcgccagcatttgtgtgcctatcaggatgcgtgctccgccgcggtgaacttccgccagatgctgctccagcgcgcctttacgactggtggtatcacggtcgattcgtgagatcggcacgccggggaagaagggcgccagcacctgctccagctgttccgtccctaacccaaccggtaacatatgtgtggagccgcaggaggggcactgacgcggtaccggacgctggctgtcgcagtgatgacagcgtaaatgatgctgcgcctggtgcagcgtgtagtagtgatcgcaacgcgggcactctgcaatccagccgcagtcgtggcaaagcagcgcgggcgcgaatccccggcggttaagaaataaaattacctgattgtcggcctggagatgttggcgcatacgggcgataagggcgggcgccagtcccgcctgaagacgctggccttttaaatccagcacatgctgcagagctgggcgggcgttgcctgcgcgccgcgtcagacgcagcatccggtattttttctgccgcacgttacatagcgtttccagggctggggtggcggagccgagaataatcgggatctgctcgctatgggcgcgatacactgccaaatcgcgggcgtggtagcgccacccttcctgctgtttataagagctgtcgtgctcttcgtcgatgacaatcacgccaagatttttaaacggcgtaaacagcgaggaacgcgtgccgatgacaatcgccgcttcgccgtttttcgctttcagccatgccgaaagacgctcgctgtcgtttagcccggaatgcagcacttccaccggcgcgttaaaacgttcgcgaaaacgggcgatcgtttgcggcgtcaggccgatttccggcaccatcaccagcgcctgtttgccctgggcgaggacgttttccagcacgctcagatacacttcggtcttgccggaaccggttacgcctgccagcaaccaggcggagaaaccgtccgacgcgctgtgaatcgcgccgactgctgtcgcctgttcggtattcagccgcaggcgctctcctgcgacggcataacgctcccgccagtcggtaaacgcgggcgtttcactggcaagctcacaaagtcccttacgccgcagcgtttgcagcgtggcgtcagtaaaatcaagctcggctacctgatagcgccagatctttccttgccgtagcgccgccagcgcctgttgttgtttggcggagcgtttcaggctgttgatatcgacggcttgcccctcttcggtggcgaaccaataccataggggcgcgttgctggctggttttccctgacgcaataaaaccggcagagcgtgaaacagaacgtcgccgaggggatggtggtagtaatccgccgcccagaggagtaagcgccagatggagggagaaaagattggctcgttatccaggatttcaatgaccgattttaattcatcgagcggcaattcgctgtggtcgctaatcgagacgacaatgcccacgcgctcttgctgcttgccgaatggcacgcgcacgcggcacccggctttggcgaccccgccttccggcagcaggtaatcaaaggttcggggaagcggaacgggcaaggcaacgtgcgcgacggacatagcatcttcctgacttgaaatttcgtcgggtagtatacacattacgataagggagcgcggatcagtttgcatacggtggtcaaattctgtatgattcgccgcctttggtgcgtgttgtgagcatcaaaccctttactattaacttcgcgtggtgtctggcgttagggctggaagagcgacgcggccttacactgaggttccccatgaaaaaaggtattcacccgaattacgtagaaattactgcaacctgttcttgcggtaatgttatcaaaacccactctaccgtgggtcacgacctgaacctggacgtgtgcggcaaatgccacccgttcttcactggtaagcagcgtgttgttgataccggtggtcgtgttgagcgcttcaacaagcgcttcagcatccctggcagcaaataagttaccgccagaaaaaaaagcgccgcagggcgctttttttgttttctagggataacagtatttgttcagacacattctgtgatccgtaatcgctttcattacgcttcctgccgtgagttttaacgaaggatttatagtcagtcccgcactttccagccccttcgctgtccatttattgcaggtattgagtatgccgtagcggccattcgcggcgtaaaactggctatcgccgtaaattccttgttttaacggaatcagattacccccttcgtcacgcgcaaagctgcggcccagatagcgcatcagactgttacgctggtttgtgtgcaggagcagtgattttatctcgctaccgacgaaatagcgttctggttgaccggaaaaggcgacgatgtgcataaccgcgccggatgaccagaacatggcctggagcgtaagcgcggtggttatttcttgtgactgataaaagcccttatcgccccagccgatttcataccactgcgtctcctgagcgaaccgttttttaagctgtggcagaacggtattaacatcatgggccggcgcaataattcccgtgtgccagccatgactgacgatatagatttccgtcggggagggctgtccgcctgtcgtaggttttacggcttgtggaaaggttgtgcagccatatagcaataaacttatccaggcgataaagagatttttcatgacatatcaccagcaaaggcgcggtatattgtggcgtttgtctaatgacgctgcgcttatcgggtcggtgccggattggtaattcattgatatttttgcattcctcttcgagggcaataaggcgaatgtcataactacaatacgttttaaccattcaggcggaagttagcttccgcctgttttacttttactatctcgctttattttttaaacatctgctctggatcgataatcagcgcccgataacccagcataccggcacggttactgtgtacttttagctccagcatcacatcctgagtaccgtctttgacttcatccagaacggaaacgatcggttttgtaccgctcattcccgctgtggccgagtacatgaacatcgttttggtttccgggcgatattccgtgacggaagtaatggcgctgtaccagtcaaaaccgcgctctttaccatattcccacatttgggaaaccgtcatatttttttcgtcaatttgatattccacgccgcgggaatatttcattgatggcatggccggttgttccatgccgcgcgcatcgccgttatcaaaggcggtcacgacggttttacctccggtgcttttggatggcactaaccaaccggtatgttgtgtccatgtccagtcaaatccaccgtcgcagtggtgcgcttcgcaggttagcggtttaccgttgctgtctacgggtttcagcacttttttcgccagttcgcctttccagccggatggatcggaaagtatccatttcacttttttatcgcgaccaattttgatgatggcagactggtggcgcgagctaatgataatgctgtcgtcgcgaggatcgtagctgacggagttaacatgcgcccagttgcggcccgggccggagcccgcgatatcgccgaagggttgttttgcaagctgctctttggtcatgacctgaccggaatgttcggcatcgacgctcaaacataccgctccctgatccatcgccagaataacgtcgtcacgataggggtcgaggatttttggcagatcccagtaatcgacggtatcgccgttctggtcaacttcaagaatatgatcacgcacagtattgatggtgtatttaccatttaatggataattttcttttgcgacacgcagcaggtaggtgcctttcggcgtttcggtaatggcgtgcgaaaaatcaataaatccttttggcagtcgtttatcggaaataacgcggcctaagaaatcatatttaaagtaacgttgaccctggccaaacataagattgccatcgttaacctgatggaagcccatcatggaaccaaagcgcgttatatcatcctggttacggaatttatcaatattcatatagccgcgaacatcgccattcgtatcgctaatccagttgataccggtataatcccagttcgccgcgccgcctgcgacatgcataatgtggccggctcttggcatccccgttatatggttaaaaagatataagcggtttttaagcgagctatcgactttaaccggttctaccgtaggaagaacggcagtttgcccggtagtagagggtaatgataccggtgcggcgtaaatggaccacgtataagtttgttttttaccttcttcagtccagtcaactttaactttattgacataatctggatacaagccaaatacaggtatgccgtcatgggtatttatagcctgcgggccgacatcataactgatcgggatgcctttttcccctttccctaaaacggtaaccttcacgtcctgtacattatgattggctttattaatgattgctgttaatgggaaaacgccgccgtagggagcgacatcgaccatacctaatggcccttcatggactggaatgacatctgctgatgcgaccattggcctgtttgggtctaaaacgcctgaggccaaaacgctgccgctcaaacacaggcagcataatacaggtaagactttccttgtaaataacatatttatttccccattcgatattatcgataaaatgaatgtatattaaccttcttatttatcggagatgaaaaaacatttaaaaaagtaaaacaatccgcggaggggaataatgatgttggtcacaaatatgaggtgtccatagtctttttaacaatactcattgttatactatttgttcagtaaatatatggcgctgtattattattcatatgcgctttgctacgtgaaacattaaataaatattagaagtttaaatataataaaattatatcggttataacatgccgggaattttttccaggaaaataacgaagagaaacttatcatgtctgacaaatttatccaccgagggttattcgggaagatgaacatttagaacaatgtcggagatagccgtgtacaaggggaatcgttaaaaaagcgcggccagaggcgttctgaccgcatgctttgctatcagtattcccacgtttccggatcaatccccaactcacgcatgatctcttttgccgcttccgggatttcatcgctgcgctcttttcgcagatcggcatcatccggcaagggttgcccggtaaaggcgtgcagaaatgcttcacacaacagctcgctgttggtggcgtggcgcaggttgttcacctgacgacgcgtacgttcatcggtgaggatttttaacaccttcagaggaatggaaaccgtaatttttttgacttgctcactcttcttaccgtgctcagcgtatgggctgatatattcgccgctccattcagccatgagatacttaatcctcttcgtcattaatattgaggtctgaacctgagcccggaccataatcgcgcgtagtttaccgtagtggcgcggccctgacacgaagttagcggtcgcagatgtgcgctaatgcatataattttaacggctatttgcggtttgctcaatctatacgcaaagaagtttagatgtccagatgtattgacgtctattgtggtagtggttaatctgtggcctgactttcaccgactcagccaggaatatcttcatatgacgcgtaaacaggccactatcgcagtgcgtagcggattaaacgatgacgaacaatacggctgcgttgtgccgccaatccatctctccagtacctataactttaccggtttcaatgagccgcgcgcgcatgattattcccgccgcggtaatcccacgcgtgatgttgttcagcgcgcattagcggaactggaaggcggcgcgggcgcggtattgacgaataccggcatgtcggcgattcatctggtcaccaccgttttcctcaagccgggcgatctgctggtcgcgccgcatgattgctatggcggcagttatcgtctgtttgacagtctggcgacacgcggctgttatcgtgtgcggtttgtcgatcagggcgatgaacgcgccttacaggcggcgctggaagaaaaaccgaagctggtactggtagaaagtccaagtaatccattgttacgcgtggtggatattgcgaaaatctgtcggctggcgcgcgaggcgggcgcagtgagcgtcgttgataacacgtttttaagcccggcgctgcaaaatccgctggcgttgggtgccgatctggtgttgcattcatgcacgaaatatctcaacggtcattcggatgtcgtggccggcgtggtgattgctaaagatccggaagtggtcactgaactggcgtggtgggcgaataatattggcgtgaccggcggggcgtttgatagctatctgctgctgcgcggtttgcgaactctggtgccgcgtatggagctggcgcagcgcaacgcgcaggcgattgtgaaatatctgcaaacccagccgttggtgaaaaaactgtatcatccgtcgctgccggaaaatcaggggcatgaaattgccgcgcgccagcaaaaaggctttggcgcaatgttgagttttgaactggatggggatgaggagacgctgcgtcgttttctgggcgggctgtcgctgtttacgctggcggaatctttagggggagtggaaagtttgatctctcacgccgccaccatgacgcatgccggtatgtcgccgcaggcgcgtgcctccgccgggatctccgaaacgctactgcgtatctccaccggtattgaagatggcgaagatttaattgccgacctggaaaatggcttccgggctgcaaacaaggggtaaacatgagtgtgattgcgcaggcaggggcgaaaggtcgtcaactgcataaatttggcggcagtagtctggcggatgtgaagtgttacctgcgtgtcgcaggcattatggcggagtattcgcagcctgacgatatgatggtagtgtccgccgcaggcagtaccaccaaccagttgattagctggctcaagttaagccagaccgatcgcctttctgcgcatcaggtattacagacgttacgccgctaccagtgcgatctgattagcgggctgcttcccgccgacgcggcagatgatttaaccagcgcttttattagcgatctggaacgtcttgccgccttgctcgacggcggcgtaacggatgccgtctatgctgagatcgtcggacacggcgaaatttggtcggcgagattgatgtccgccgtcctgaatcagcaggggctggatgccgcctggctggacgcgcgcgcatttttacgcgccgaacgcgccgcacagccgcaggttgatgaagggctatcttatcctttattgcagcagctactggcgcagcatccgggcaaacgtctggtcgtgaccggctttatcagccgcaatcatgacggcgaaacagtcctgttaggccggaacggttccgactattccgccacgcaaatcggcgcgctggcgggcgtttcccgcgtgaccatctggagcgatgtcgcgggcgtttatagcgccgacccgcgcaaagtgaaagatgcctgcctgctgccgttgctgcgtctggacgaagccagcgagctggcgcgtctggcggcgcctgttctgcacgcccgcacgctacagccagtgtccggcagcgatatcgatttgcagttgcgctgtagctacacgccggatcaagggtcaacccgaattgaacgagtgctggcttccgggacgggcgcgcgtatcgtgaccagtcacgatgatatctgtctgattgagtttcaggtgccagccagccaggatttcaggctggcgcataaagagctcgaccacattttaaaacgggcgcaggtgcgtccgctggcggtgggcgtgcatcgcgatcgccagctattgcagttctgctataccgccgaggtagcggatagcgtactgaaactcctcgacgatgtcgggctgccgggcgaattgcgcctgcgacaggggctggcgctggtggcgatggtcggtgcgggcgtcactcgcaatccgctacactgccatcgcttctggcagcagttgaaaggtcagccagtggagtttacctggcagtcggaggagggcatcagtctggtggcggtgctgcgtaccggcccaactgagagcctgattcaggggctgcatcagtctgttttccgcgccgaaaaacgcattggcctgatgctgttcggtaaggggaacatcggctcccgttggctggaactgtttgcccgtgaacaaagcacgctttccgcgcgtactggttttgaatttgtgctggcgggcgtggtggatagccgccgtagcctgttgaattatgaagggctggacgccagccgcgcgttggcattctttgatgatgaagccgttgagcaggacgaagagtcgctattcctgtggatgcgtgcgcatccgtatgatgatttagtggtgctggatgtaaccgccagtgcacagttagccgatcagtaccttgatttcgccagccacggttttcatgtgattagcgccaataaactggcgggcgcaagcgccagcgataagtatcgccagattcatgacgcgtttgaaaaaaccgggcgttactggctgtataacgccaccgtgggcgcgggattgccgatcaaccacacggtgcgggatctgattgacagcggcgatacgattctctcgatcagcgggatcttctccgggacgctatcctggctgttcctgcaatttgacggtacggtgccgttcaccgatctggtggatcaggcctggcagcaggggctgaccgaacccgatccgcgcgtcgatctttccggaaaagatgtcatgcgtaagctggtgattctggcgcgcgaggcgggatacgacatcgagccggatcaggtgcgtgtagaatcgttggtgccggcgcattgtgaagaaggatctatcgatcactttttcgaaaacggcgacgcgctgaatgaacagatggtgcagcgtctggaggcagcccgcgaactggggctggtgttgcgttacgtggcgcgtttcgacgccaatggcaaagcgcgcgtcggcgttgaagcggtgcgtccggaacatccgctggcggcgctgctgccgtgcgataatgtctttgctattgaaagccgctggtatcgcgataacccgctggtgatccgtgggccgggcgcgggtcgcgatgtgaccgccggggcgattcagtcggatatcaaccgtctggcgcagttgctgtaataaaggcaagttcgtgagcgaagcgccgggttgcgcttcgctccctcatcaatacgttatgcagtcattctgtagatactgatatacgaagcgccatccgattgctgacgaaacattatggcgtgatgctttttacattctcaacccggacatccatccgggggtaaggaatattgatgccgttttcatccattgcttccttgatattttccagaagatcgtagtaagtactccagtactgagcgttgggcacccatacgcgaacatagaaattcaggctagagggcgcaagttcgcccaagcggaccgtaatatcgcgggttttatcaatgcgatgatcttgctcaataatacgatgtatcacgttttttacgtcagcaatacggctttggtaatccacgccaataatcagatcaatacgtcgataggggtgtcgtgaatagttgataatattatcagcaataattttaccattcgggatgacaacttctttgctatccgcagtgagcagagtggtggagaaaatatggaccttttctactgtgccgataaccaggccaatttgtacaatttccccggcgcggaaaggacgcagggagacaagcagtacgcctgcggcaaagttggaaagtgacccttgcagcgccaggccaatggctaaacccgccgcgccgataacggcaataattgaggaggtttctataccgacacggccaagagcggctactgccgtgaaagctatcgtgatgtagcgaaccagcgcggagaaaaagtggacaatagtggcatccacttgccgcctgagaagtaatttttccagccccctcgatagtaagcgagctattaacttaccgatgaaaagtagaatgatggcggcaacaacattccagccaaaatgaattaccgagtcactgtgctcggccatccatttgatcgcgcctttaatttttggaaataactcaaaaccttccatgtttatcctctgtcagcagtatccgcggtattagcggtaataaaacggttcatttttgcctggataatcgccgcgccgacgggtggcagcagtaacgcccagaatagtgtccagccggttcgtattccgccatcttcgtttttattcgccagcagagcgcggatttcgtcgctaagcgtcagacacaatatggctgtgccaaacggcataatggctgacagccatcccgcgccacatgcggtcatgagtcggggcgaaggcgccacaaattgcatttcccggtgaattctgaagaaccaataaataatataaaatggaatgaaaaagcccaataatgcgacgacaaggggttctgcgcactcaggtcgctgggttgatgagaaccttttgggcggtgcaatatagaaaagttcttttttgagcggtaatagtagcaaaagcgcgataaccgctaaagtaattacgattattcctatataaggaattgagtatataaatatagacagatagccagcgatgataaatttgaacagtaagcagaggctaaataaaataacaaatgtctgagcactgccgatagcgctgaaaagcagcatggggactaacagcgttatgatccccatacccagattaattaaaaactgcgctatgataagcctgactacgtcagacgggccatttatgcagaaggaacagaccacgccaatgattaacaggagcgcaacaaagtagaaggggtaacaattttttatacggcagacaaaccagctggcaaccatacccaggaggtatcccagttggccgcaaacgagaataacaccaatacgatcggctggaatagacagtgatttactccaaaaataaacaccatacgacgatcccagcgaactgataaaagagagcaccaaaaagaaaaaagtgatcccccagaatcgatagctactcaggagatcggcgcaggtccattttttatctgacattgacggtaaagtaatttccatatttatcccttgttttccatagaaaataagaatgtatagaactatttaaattgataataaatattgattatgtgaataacgtttatagccgatcttaacttaaaacgaagggccattttataaaatagttctattctttttcagcgtataaaagcaggatgtgaggtgattaaatctatagcgccttctgaatgataatctgtgattttttatgcgtggcattacatcattgggttaaatgtgattccattgtgaattatatttttccgtcagaaaatacagaatttgcgtgacgcgtttggcggaatagtgggcgctttgctggaattcaggttgttgccatagccaggtaacaaagcggcgactggccgccagattaacggcgacaccttgttctaagtgggaaccggttaacgaacagaccattttgcggttgtgaccttgcccccagagttgccactgattttgccaccatccctgccatgttttgcctaacagttgccactctgcgcggcaatcgtcatcgtttatctcttcctcaacgaaccacagcgaggagagacgctggcgaaaccgctccgcccatgccgtaatgaccgcgccgcgcaaaaaacactcatgggcaatgatgtgtgtcgcgacatcaggaaagcggtttttcagcacccgaaaatgaccatgcgccgtaatgaccgggcgaagtattgttccttgcgcgttacgtttaagcgccgccgggccatactgaatctcatcgaactgacttcgctgtaaaaattgccgttctttaatggcgatacggtgaataatatcgcccttctcgccctcgggcggcgcaattcctttccagtggtaatgcaaactttttccggcagacagtaacgtgaaattgctggaaaggtgaagaatattgccgcgaacagcatcaaaactgaataaaaagtacaattgctggaaggcattcgctccctgaaacggtacgagcagcggaatactgcaaatctgttccggcgtttcggcgacattcagcgcgtgctgttttggcgtccagactttcttacagtactggcactgaagtcgctgcgttccgccgggattacgtccataacgaatccatgttttttgatagcagtcggggcaaaagtgaccatgctctttggcatattgcgcgatataagcagacgcccagcggcgaaattccccctcgttgaagagcggcggataactgccgcaggctcgacaatgcaatgccggataacccaggcgatagtccggccacacataatccggcgagtcaggcagcccaagattgcgacaaccagcgcttttgcaggcattaatggtgaacagaggcggcatacattttaccaacgattttggcaggtcgttgattctgccttcataaaacggtacgcgggtgtgaggactctcacataaaaaaacctttcagaacgtaacgtagcgaatctttatatgactgaaagggacttatttatgaaagtaaaactgcttgctgccggtattttgttcacgctgccgttctgggcctgcgccaaagatgtcaccattatttacaccaacgatctacacgcccatgtggagccttataaagtaccgtggattgctgacggtaaacgcgatattggcggttgggccaatatcaccacgctggtgaagcaggaaaaagccaaaaataaggcgacgtggttttttgatgccggagattactttaccggaccgtatatcagcagcctgacgaagggtaaagcgattatcgatattttgaataccatgcagtatgacgctgccactatcggtaatcatgagttcgatcatggctgggacaatacattgttgcaactgagccgggcgaaattccctatcgtacagggcaatattttttatgaggacagcagtaaatccttctgggataagccgtacaccattgttgaaaaagatggcgtcaagattggcgtaatcggcttacacggtgtctttgcttttaatgatacggtatccgccgcgacgcgcgtgggcattgaggcacgcgatgaaattaagtggctgcaacgttacattgatgaacttaaaggtaaagtcgatctgaccgtcgcgctgatccacgaaggcaccccggcccgccagtccagcatggggaataccgatgtgcgacgcgcgctggataaagatattcagaccgcaagtcaggtaaaagggctggatattttgattaccggccacgcgcatgtcggtacgccagaaccgattaaagtcggtaatacgctgatcctctcaacggacagcggcggtattgatgtgggtaaactggtgctggattacaaagagaaaccacaccactttacggtgaagaacttcgagctgaagaccatttttgctgatgagtggaagccagatccgcaaacgaaacaggtgatcgacggctggaacaaaaagctcgataaagtcgtgcagcaaacggtggctcagtcgccggttgagctgacccgcgcgtatggcgaatcgtcgtcgctggggaatctggcggcggatgcgctgctttttacggcggggaaagacacccagttagcgcttactaactctggcggtatccgcaacgaaatcccggctggcgcggtgacgatgggggcggtaatcagtaccttcccgttccctaatgaactggtcacgatggatttaaccggtaaacaattgcgcagcctgatggagcatggcgctggcttaagcaacggcgtattgcaggtgtctaaagggctggagatgaagtatgacagcagcaaacctatcggccagcgggttaccgtgctgacgctcaatggcaagccgattgacgatgctacggtttatcacatcgctaccaacagcttccttgccgacggcggcgatggttttgcggcattcacggaaggccaggcgcggaacacctccggcggctactatgtgtcgaatgcgatagttgattactttaaggcgggcaacaccatcacggatgagcagctcaaaggaatgcgcgttgcggatgtgaagaagtaatttcccctgccgcggcgcgttcagtgtcgcggcgtgacatgaagaaaattcaactttgctgaatattcctcattctttggcgtgatttttcagttgacgtccttctgcttttccgtcatttttacatctggacgtctaaacggatagatgtttacaacacaacaaataataacatgcgattgatgaggtaaggtatgagcttttttcacgccaaccagcgggaagccctgaatcagagcctggcggaagtacagggtcagattaacgtttcgtttgaatttttcccgccgcgcaccagtgaaatggagcaaaccctgtggaactccatcgatcgcctgagcagtctgaaaccgaagtttgtttcggtaacgtatggcgccaactccggggaacgcgaccgcacccatagcgttattaaaggcatcaaagagcgtactgggcttgaggccgcgccgcaccttacctgtattgacgccacgcgcgatgaactgcgcaccatcgcccgcgactactggaataacggtatccgccacattgtcgctttgcgcggcgatttgccgccgggcagcggtaagccggagatgtacgccgccgatctggttggtttgctcaaagaggtggccgatttcgatatttcagtagcggcctatccggaggtacatccggaagcgaaaagcgcgcaggccgatctgcttaatctgaagcgtaaagtggatgctggcgctaaccgcgcgataacccaatttttcttcgatgtggaaagctacctgcgttttcgcgaccgctgtgtttctgccggtatcgacgtagaaattattcccggcattttaccggtgtctaactttaaacaggcaaaaaaatttgccgatatgaccaatgtccgcattccgtcctggatgtcactgatgtttgaggggctggataatgacgcagaaacccgcaagctggtgggcgctaacattgcgatggacatggtgaaaattttaagccgtgaaggagtgaaggatttccacttctacacgttgaatcgtgcggaaatgagttatgccatttgccacacgctgggcgtaagaccgggtttataacctccagctccctgccgggagctttattacaactcatattgatctacatctctgtaactaaaaatataaaaggtattagctatcgaatctgtggattaattcaactatatctatttgctcctggtgtatatcgtaacggtaacactttaaaagggagctgagatatgagcacgaccgacgatacccataacacgttatccactggaaaatgtcctttccatcagggggggcatgaccgaagcgcaggcgcagggactgccagccgcgactggtggccgaaccagcttcgcgtggatcttttgaatcaacattccaaccgttctaacccgctgggtgaagactttgactaccgcaaagagtttagcaagttagactactccgccctgaaaggggatctcaaggcgctgctgaccgattcacaaccgtggtggcccgctgactggggcagctatgtcggtttgtttattcgcatggcctggcatggcgctggcacctaccgttctattgatggtcgtggcggcgcgggtcgtggtcaacagcgttttgcgccgcttaactcctggccggataacgtcagcctggataaggcgcgtcgtttgttgtggccgattaagcagaaatatggccagaaaatttcctgggccgacctgtttattctggcgggtaacgtggcgctggaaaactccggcttccgtaccttcggtttcggcgccgggcgtgaagatgtctgggaaccggatctggatgtgaactggggcgatgaaaaagcctggttgactcaccgacaccctgaagcgctggcaaaagcgccgctgggcgcgaccgagatgggccttatctacgttaacccggaagggccggatcacagcggcgaaccactttctgccgccgccgctattcgcgctacctttggcaatatggggatgaacgacgaagagaccgtggcgttgatcgctggcgggcataccctcggtaaaacccacggcgcggcagcggcatcccatgtaggggccgatccggaagccgcgccgattgaagcgcagggcttaggttgggccagcagctatggtagtggcgttggcgcggatgctatcacctccgggctggaagtggtctggacgcagacgccgacccagtggagcaactatttcttcgagaacctgttcaaatatgagtgggtacaaacccgtagtccggctggcgctatccagtttgaagcggtagacgcgccggacatcatcccggacccgttcgatccgtcgaaaaaacgtaagccaaccatgctggtcaccgacctgacgctgcgttttgatccggagttcgagaagatttcccgtcgtttccttaacgatccgcaggcctttaatgaagcctttgctcgtgcctggttcaaactgacgcacagagatatgggaccaaaagcgcgttacatcggaccggaagtgccgaaagaagatctgatctggcaggacccgttgccgcaaccgctctatcagccaacgcaggaagacattatcaacctgaaagcggcgatcgctgcatccgggctttctattagcgagatggtttcggttgcctgggcatccgcgtctactttccgcggcggcgataagcgtggcggcgctaacggcgcgcgtctggcattagcgcctcagcgcgactgggatgtcaacgccgttgcggctcgcgttctgccggtattagaagagatccagaaaacgacgaataaagcctcgctggccgatattattgtgctggcgggcgtggtcggtatcgagcaggcggccgctgctgcgggtgtcagcatcagcgtaccttttgcgccgggccgggtggatgcgcgtcaggatcagaccgacatcgagatgttctcgctgcttgaaccgattgctgatggattccgtaactatcgtgcgcgtctggatgtgtcgacgaccgaatcgctgttgattgataaagcgcagcagttaacgttgaccgcgccggaaatgacggtactggttggcgggatgcgtgtgctgggaaccaactttgacggcagccagaacggtgtctttaccgacagaccgggcgtgctcagcactgacttcttcgctaatctgctggatatgcgttacgagtggaagcccaccgacgacgctaatgagctgttcgaaggccgggatcgtctgactggcgaggtaaaatacacggcgacccgcgccgatctggtgtttggttccaactccgtactgcgcgcgctggcggaagtttacgcgtgtagcgatgcgcacgagaagtttgtgaaggacttcgtcgcggcatgggtgaaagtgatgaacctggaccgtttcgatctgcaataatctgacaggttaattcgtcagcggctgctattcggtagtcgctgacgttttcctcgtttaatgcgaaaaataacgaaaatgccccgtgactttccagttaaataatacatcttcctcctgtgctcccgcgcctatgttatgcacaaccagcggcaccccttcaggcgtgacgttcagggataccacgccaatatgcgcaaggccgttatccagtcgccaggagacaatatctcccggttgataatcgctatatttatctgtcaccggcaaagctttgttttgacgctggaaccaggtttccagattcggaacgcggcgatggtcgatattgctgtccgggcgtttcagcttccagttattcgggtaggcagagaaatgcgcctgcatgtcttcatgtacccgtttctgtaaatcaacctgctgactgcgcagcgcgcggatgacgacatctgcacatacgccacgctccagcggaagatcgccattcggataatccagacgaacataggcagcatcataaaatagcgtcttacctatttgcgtcccggcactttgggcgattgcagcattagtttgcgcctgaacggttattggtctggtatcagagcgtggcgaatgatgagagatatggctaataaaaaaagcagcaagaataccgataagcgcctgtgcgaatttcatcttcttcgtccgtgaagtgtgtcagtacgtcatttgactttccgcggagagaatggtgcgtgataaaaaagtctatttcaggacaaaatggactgattccaggctatggaatacctgatgatggcgcttcgcttacccggcctggatgattggataacaaggccagataaggtgcctgtgtcgatattcggcaactgaattctgttgggtcagcaagctgaaatactcctgactatcgtcaggagtattgctcagaccttattcccattcctgcaagaagcgttgaccgtactggtcggcgaccagcagcgcggcgtacacttcatccggcgttgcgccgccaggcatgttatgaatagtttcaccttctgcgcaggaggcttccgcgacggtgcgcatcttggccggaatatcctgtttaatatccagttgcgccagcgtaatcggcaggccaacggaatggcacagcgccgcaacggtttcgatttcttcgaccggcgcgttttccagcaccagttgcgtcagcgtaccgaaagcgaccttctcaccgtgataatagtggtgcgcatccggaatcgccgttaaaccgttatgaatcgcgtgcgctgcggccagaccgccgctttcaaaaccgaccccgctcaggtaggtgttggcttcgatgacgcgttccagcgctggcgtgacgacgtgctgttcggcggccaacatggctttttcgccttcttcgatcagcgtgttatagcatagctccgccagcgccagcgcggcctgtgtacacttgccgcccgccattgtggtggcgccgctgcgtgagcaggcgcgcgcttcaaaccaggtcgccagtgcatcgccgataccggctgccagcagacgcgccggcgcgcccgccactatctgcgtatcgacaataaccatattcgggttatgcggcagcagcagataacggtcaaactcaccggcatcggtataaataaccgagagtgcgctgcacggtgcgtcggtagaggcgatggtcggcgcgatagcgaccgggacgttcataaagtgcgccagcgctttggcggtatccagcgttttaccgccgccgatacccagtacggcgccacactgacttttttcggcgacggcgcgcagcctgtcgatctcattttgcgaacattcgccgccaaacggggcgatttctactgacaaaccggcatccgtcaggcttttgcgcagcgtctcttcggcaaatcccagcacgaatttatcgcccacaaccagccagttgttcgccattggttttaaataatcgccaagacgcgcgatgacgtttgcaccctgaatatacttacctggtgactgaataatgcgatccatacatttctctcctacaggttcagattaccaaaagcgtttttccagtcttgctcaaacttctctattgccgactctaccgcaggcgtattgagcatttgttgcgctacatctaaaggaagggtaatcgcctggcaacctgccagtaagcaatccagcgcctgccgcggcgttttaaagctggccgccagtaccatgctgtcgggcgcgtgatgttccagtagcgtttgcagctcctgaaccatacgaatgccatcgccgccctgcgcatcaacgcggttgacgtagggagcgacatattttgcgcccgccagcgccgccagcaggccctgcgatgcgctgtagacggcggtgcccagcgtcacgatgccttcttttttcagcaatttaatcgctgcaagaccttcggcggtcaccggaattttaaccacaatgccggggatggcgttattcagtcgtttggcttcttccaccatccctttcgcgtcgcggctcatggtctgcgcaaataaagtgccttcttcgccgatggcgttttgcagcctgggcagcacatcccagatagattctttgctggctgccacaatgcttggattggtggtgacgccggcaatcgggaaaatgcgcgccagacgttcaacttccgccacgttagcggtatccagatagagttccatagtctttcctttacagttcaagttcatgttgcagcaggctggcgatagcgtcggcggaagcggcgttaaccagcgtgttgcggaattcttcgtgcatgatgcggcgggccaggcgcgagaaaatacgcatatgctggtcgcccgcggcgtgtttgttaagcgtcagcataatgatgaactgcgcctcgtcatctccccagcgtaccggcgcgttcaggcgcgccacgctgatggtggactgttcgatatgttccgatttgctgtgcggaatggcaaagctaaagcccagtccggtggagaataccgcctcgcgcgcccatagatcggcttccagtttgcgcgggtagcggcagcggcccgccagcagcagattgtcggtcatgcctttaatcacctcctctttgctgcgccagtcgctatcaagcgttatgcattgggcggtaaccagcggggcatcctgctgcgacatgcggaactgcgccagcagatgctccacctccagcgaggtgcggcaggccatcgcctgattcaacaactggcggcaggctcggctgtcgagttgtgccatccgcgctttggcggcgggaatcgacggcgcgcccatgctgatctcgtccagccccagacctaccagcaatggcagaaccgaacctttggcccccagttcgccgcacagaccaatccatttgccctgacgatgtaccgcctgcaccgcgaaatccaacgcgcgcaggaaggcgggattcaggctgttgtagtgacgagtgactttggcgttatcacggtctaccgccagcaggtattgtgttagatcgttactaccaatactaaagaaatcaatctcttcacagcattgatcgatgatgaacatcaccgacggcacttccagcataatgccgagtgggatcttctcatcgaacgggatatgttcattacgcagctgctgtttggcttccgccagcttctctttgacccacagaatctcttccatagaggagatcatcgggatcatgattttcaggttgccgtgggcggacgcgcggaggatcgagcgtagctgggtggtaaacagagaagcgtactcttcataaatacggacggcgcgatagccgaggaatgggttggcttcggcaggaatattcagataatcaacgggcttatcgccgcctatatccattgtgcgcacaataatgctgcgtccctttgcggactccagagcctggcaaaaaatattgtacagctcgttttcgtccggcgcgcaggcgcggtccatatacagcatttctgtgcggaacaggccaaccgcttccgcgccgttactaaaggccgcttgcgcctcgacggagtgcgcgatgttggcggcgacctccatgcggatgccgtcagcggtgcgcgcttcctgggtcagccagatgcgctgctgttcgcgcagggcgtcttgcacgcgggcttcctgctgatagtaacgagtgacaggctcgtcaggcgcaacgacaatcgcgcctgcgttgccgtcaatataaaccgtctgctgacgccacggtgttaaggcctcaatctccacgccaaccagggtgggaatgttgaatgagcgggcgagaatcaccgtgtgcgaagtggtgccgccgctttttaacagcagacctttgagaaaggttttatccagttcgaggaactggcttggcgtcaactcttccgccatacagatagatggccgggtcaactggcccggcgccggaaagcgctgcccaccgtaaatgtgttgcagtaactggaagcaaacgtcacgaacatccagcgcgcgttcctgtaaatagctgctgctggcgcgagcgaactcattgcagaaatggttcgcgctttccacgattgcctgcgcgcagcttaaaccgcgcagaacgccgtccagtaaatgctgacgcagtgaagcgtcgcctgccagtgaacgatgggcttccagaatcgcgctggcggcaccgtcactgtcgagctgacgaaactcaatatgctttatcaacatcgctaagccattgtccagcgcggcttgttccgtctctgtgtcgttggcggtcgggagttcgccgagcgcattgagatccagggaagagagtggcgtcagtacgccgcccgcgctgccgctacacacgctacgggcgcggtaaatctgcggattcagctgggtcaacgacgccggaagcggctccagttcgctgtttttaatctccgccagcggcgcgtcgcagagtgggaattcatcgcgcagccattgactcagacgctgacaggcaacctgttcatcggcaccggaaatcaccagctgacagtggtcgccagccagcgtgtcggtgccaatcagcgccagcgcgcttttggcgctgcctttgcgatcggtgcgcaggttgtgccactcaatttgcgacgtgaaggtattacacagcgtttctacgtggcttgccgggcgcgcatgtacgccattcggcagttcacaggtaaattccacaatcaggggcattgcctctctcccataacgattctctcgctacagcataaaaggaggtagccggaatacgccatgtgacaaatctgtcaaaagctggataaatgtaatgtagcgcaaaaagtgcgagttgtctcacaacttagcgtggtagcgcgggttttacctttttcagaagttatgaagcggatcgcatttttatactgatattacaaaaatccagtaaatggcctttttatccactgtctgcgcggcaatggattgcctattgttttccgcagtaactttatggacatgggctttatccagcccgggagcgacttatgaaagagttggtacagatcctgaaaaatacccgccagcacctgatgaccggtgtttcgcatatgatcccctttgtggtggctggcggaattttgctggcagtctccgtcatgctatatggcaagggcgccgtacccgatgccgccaccgatccgaatcttaaaaaactgtttgatatcggtgtcgccgggctgacgctgatggtgcctttcctcgccgcatacatcggttactccattgccgaacgctccgcgctggctccttgcgcaattggtgcctgggtgggtaacagcttcggcgcgggttttttcggggcacttatcgccggacttatcggcgggatcgtggtgcattacttgaagaaaatcccggtgcataaggtgctgcgttctgtgatgcctatttttgtgattcccatcgttggcacttttatcaccgcgggcatcatgatgtgggggctgggcgaaccgatcggtgcgctgacaagcagcctgacccaatggctgcaagggatgcagcagggcagcatcgtgctgctggcggtgatcatggggctgatgctggcttttgatatgggcggcccggttaacaaagtcgcttatgcgttcatgctgatttgcgtggcgcagggcgtatataccgtggtggctatcgccgcggtgagcatctgcgtaccgccactgggactggggctggcgacgctgattggccgcaagaatttttctgttgaagagcgcgaagccggtaaagccgcgctggtcatgggctgcgtgggcgtaacggaaggggcgattcctttcgccgctgccgatccgctgcgcgtgatcccatccattatggtgggctccgcttgcggtgcggtaatggccgcgctgtttggcgcgcagtgttatgccggttggggcggtttaattgttctgccagtcgtggaaggcaagctgggttatgtcgcggcagtcgccgtgggcgcggtggtaacggcagtctgcgttaacgtgctgaaaagcctgacgcgtaagaatgtgtcgcaagttgacgaaaaagaagacgacctggatttagattttgagatgaattaagcgaggaataagccatgactaaaattattgcagtaaccgcgtgtccttctggtgttgcgcatacctatatggcggctgaagcgctggaaagcgcagccaaagcgaaaggttgggatgtaaaagtggagactcagggctcgattgggctggaaaatgaactgacggcagaggatgtggcgagcgccgatatggtgattttgactaaagatatcggcatcaagttcgaagagcggtttgcgggtaaaactatcgttcgcgtcaatatcagcgacgcggtaaaacgcgccgacgccattatgaacaagattgacgcccatctttcgcaaaccgcgtaacgttaaaatgcccgatggcgcaagtttatcgggcctgctcacaggcccgataagagatttatgccgccatccggcgctcgtgtccacaggagctcctcatgacccatcgtattcaacgcctcaaagccgctctgtttcagaatcaccgtgaaatttctctggagcgcgcgctgctttataccgccagccatcagcagacggagggcgaaccggtcattttgcgccgcgccaaagcgacggcgtatatccttgaacatgttgaaatttcgattcgtgacgaggagctgattgccggaaaccgaaccgttaagccgcgcgcgggtattatgtcgccggaaatggacccgtattggctgcttaacgagctggatcggttcccgacgcgtccgcaggaccgttttgatatcagcgaagaggataagcgcctctatcgtgaggttctattcccgtactgggaaaaacggtcgatgaaagattttattaacgggcagatgaccgatgaggtgaaagccgccgtcagcacccagatttttagcattaaccagacggataaagggcaggggcatatcattattgattatccacgcttgctcaataacgggctgggtgaactggcggcgcagatgcgcgcgcgctgcgagcaacagccggaaaacgacttttatcaggccgctctgttgttacttgaggcatcgcaacgccacatcctgcgttatgccgtactggcggaacagcaggcggagcgctgcccggacgctcgtcgtcgtcaggaactgctcaccattgccgccaattcgcggcataacgcgcagcacaaaccacagacgttctggcaagcatgtcagctgttctggtacatgaacattattttgcagtacgagtccaacgccagttcgctgtcgctcgggcgcttcgaccagtacatgctgccgttttatcagacttcgctcactcagggcgacgatccggcgttcctgaaagagttgctcgagtcgctgtgggtgaaatgcaacgatatcgtgctgctgcgttccaccagtagcgcgcgctattttgccggtttcccgacgggttacaccgcgctgctgggcggattgacggaaagcggacgcagcgcggtaaacgtgctctcttttctctgcctggatgcctaccagagcgtgcagttgccgcagccgaatctcggcgtgcgcactaacgcgctgattgatacgccgttcctgctcaagaccgccgagaccattcgcctcggtaccggcattccacagattttcaatgacgaagtggtggttcccgcgttccttaaccgtggcgtgtcgttggaggatgcgcgcgattatgcggtggtgggatgtgttgagctgtcgattccgggcagaacctacgggctgcatgacatcgccatgtttaatctgctgaaagtgatggaaatcagcttgtatgaaaatgagggcaacgacactcttacttatgaggcgttgctggcgcatattcgcgccaaaatcagtcactacattacactaatggtagaaggcagcaatatttgcgatatcggccatcgtgactgggcgccggtgccgctgctctcttcgtttatcagcgactgcctggagaaagggcgagacatcaccgacggcggcgcgcgctataacttttcgggcgtacagggcatcggtatcgccaacctgagtgattcccttcatgcgctcaatgggctggtattcgatcagcagcgcctgagttttgatgcgctgctgtcgatcctgaaaaacaacttcgccacgccagaaggggaaaagatccgcgccaggcttatcaaccgcttcgaaaaatatggcaacgacattgataatgtcgataacatcagcgccgaactgctgcggtattactgcaaagaggtggaaaaataccagaatccgcgcggcggccagtttacgccgggttcatacacggtttccgcgcatgtgccgctgggagcggtggtcggcgcgacaccggacgggcgttttgccggagaacagctggcggatggcggcctgtcgccgatgctcggacaggatatgcaagggccgacggcggtactaaaatcagtaagtaagttggataacacgctgctgtcgaacggtacgttgctgaacgtgaagtttactcctgcgactctggaaggagaggcgggactgcgcaagctggcggatttcctgcgcgcgtttacccagctcaaactgcagcacatccagtttaatgtggtgaatgccgacacattgcgcgaagcgcagctacggcctcaggatttcgctgggctggtggtgcgcgtggcgggctacagcgccttctttgtcgagctgtcgaaggagattcaggatgacattattcgccgcaccgcgcatcagttgtgaggttgtgggggcgcgcgatgaggagaccgcgcgtatcttcaatatccagcgctattcgctgaatgacgggcaggggattcgtacggtggtcttttttaagggctgtccgcatacctgtccgtggtgcgctaatccggaatctatctcgccgcgcattgaaacggtgcgccgggaaaataaatgcctgcgttgcacgccgtgtctgcgggatgccgacgaatgtccttccggcgcgtttgagcgtattgggcgtgatattacgctggatgaactggaacgcgaagtgctgaaagacgacatcttctttcgtacttccggcggcggggtgacgctttctggcggcgaagtgctgatgcaggcgccgttcgccacgcgcttcttacagcgattgcggcgttggggcgttccttgtgctattgaaacggctggcgatacgtcggccagccgtctactgccgttggcaagggcgtgtgatgaggtattgtttgatctgaaaattatggatgcggagcgggcgcgcgaggtgatcaacatgaatctgccgcgcgtactggagaatttacggttactggttagcgagggaatcacggtgatccctcgtttgccgttgattcctggctttacgcttaacgcagagaatctgcagtgcgcgttaacattgttgagatcattaggaataaagcaggttcacctgctaccgtttcatcagtacggcgagccgaaataccggctgcttggaaaatcatggatgatgaaagatattcccgcgccgtcggtgcaagagatcgctctgtttcgggagatggcggagcaagcaggatttcaggtcaccacaggaggttaatatggcagtacctgtacggcatctggtggcagtgaccgcctgcgtgagcggtgtagcgcatacctatatggctgctgaacggctggaaaaactttgccagcaggagaagtggagcatcaagattgaaacccagggggcactcggtacagagaaccgcttaacggaagaggatatccgccgtgccgatgtcgtgttgctcattaccgatatcgagctggcgggcgtggagcgatttacccggagtcgctatgtccagtcggggatcagcgcttttttgcgggagccacagcgggtaatgagcgctgtgcgtaaactcctttccgcgccgcaacatacccaccttatcctggagtaatctgcttttccgttagctggctgtgatactggcggcgatactccgacggcgagcgttccgtatttttgcgaaacaggcggcagaaatagttactgtcgacaaagccgcagcggtgcgccacctctttcactttcaggtcataacccttcagcaacgttttggcgtgttccagtcgcgtatggttcaggtattcgttaaagccgatggcccccgttttctggaacaggtgcgagaggtaatttggcgagatataaaacgcctgtgctaccgattcgcgcgtcaacggcgcggcgtagcgttcatcaatatactcccgaatggcttcaaaaagcgcgcggctgcgggaggcggtctggatttggctgccgagcagatcgcggcaatggcttagtaggctggcgacaatcaatctggccgtttgctgctcttgcggctgcatctgcatctcattaagcgtttgtaacaggaacgagccgatacgcgggccgcggcgcgcaacgtgctgtttcgtgaggttttgatgctgctgaccatcccagtggactacgctgaaacctaactgctgtttgccaaacagaatgctcagggtggtgacgggcgtttgccattgcgggatgttccagccgccagccggaacgtagagaacatcgcaaggaatgagcggggcggtaatgctcatgtcagtaagctcgccctccagcacaatctccagccgcggaaaatccacctggtacgccagttccggcgctgggccgctggcgctggcaaaataaatctggcgcagcggcagcgggccgttgatgagacgggagagaaggtggctgacgtcgtgatacatgataatcccctgccgatcgcaaacagaggaaacagtaacgtcgaaaaccgatgtcctcaagcgattattgccggatagcggcgctttgcgccttatccggactacgggagagaagcacgccaggcccgataagcgttagcgttatcgggcaacatacaggctattgattaccgacctgatcgccatacggcaacgtatcataatcaatcagcgcgtttttcttatacgggttgccaatccagcgcgtggtctctttgaactgcgggttggtgatggaacgcgtcgggtcgtagccatcataggtcaggcccgctaagtccgaccaggtatggataagctcggaactgctgtacttacgatcgacatcctgtgagaagtcgcgcggatgcgctgcctgccatttctctgaggtccacagcaggaacggcaccgtatacatatgacgggttggcgaatcttcgtttcgtccctgcgtcttatgcggcggcgtgtcatacacttcttcaccgtgatcggagaagtagagcaggaaaccgttcggatcggtcgctttatagtccttaatcaggctggcgacaacatagtcgttatacaggttcgcgttgtcgtaatcattatacgattccagctcgtcactgcttaatcccggcggaacatggtcggttttaccatcaaacttgccctggttttctggatagcggaacttgtatttaatatgcgttcccagcagatgcacaataatgaattttttcggcgccgggtcggctaacaccgctttaaacggcgccagcacgttgctgtcatattcgcgcgcgctttgagtgcgctgctggttcatatagaactgcttatcagtctgcttggagaacacggtcagcatggtattacgcgccgtcatcgtctgctggttagtgatccagaaggttttatacccggcctgtttcatcatattcatcagcgatggcttcgtcagataccagtccgggttcttttcgtccgcgaacgttagcgcctgttgcaggatctcaatggtgtacggtcgcgaagttaccacgttattaaacacggtcagcccggggtcggttttatgcagcgcgtccagttccggcgtggtttcgcgcggataaccgtacagactcatacggccacgctgggtcgattcgccaatcaccagtaccagcgtgcgcggcgcatcgccggagtggtcctggaagttagccagcggcggcagggcatcgttttcattcagcagtttattcagcgaggcgagctgtaaacggtactgatagtagccagtaataaattgccacggcgcggcgggttccattcgtgatgccaggctatccagcgttttctccatcgacttatgcttgataaaggtattcatcgcgatgggatggaggatcagcccgtacagcagggcaaacgacaccagataacgccagggggatggaatataaaccgggcgcagacgtgtccacagcaaaatcgccgccaccgtataagccagcgcgacaagaacaattttcagactgaaatattggcttaaatattcgctggcttcattggcgttggtttcaaacatcacaaacagcacgctttgcgagaactcctgcccgtagattacgtaatagctcagcgccgccagcgaggcggcccagagtacgacgccaataacggcagcaataacccggatgcggcctggaaacagaaagaccgggatcagccacagtgagctgtacagtagcgaatcccgcagaccgtttgtcccgctgtatccggtgagataaataatggcctgcaggagggtggaaaagaaccaaaagtagagcagtgcccagcccagggctttccagctaaacgcgggtttagtctggagtaatgtggattgcataatgagagcctgtctttaatcgtagcgccaaacgtaacgcctgaaccttaaaagaatctgaagcaaacctgctttatgccgcacgttttgctaagaaagatttacaaatgcataaaatgcagacagaaatatattgaaaaaatgacgaggatgacagcagtatttcatgccgcccccacataactgcgtgagagcggctctcttttggcgttagccggtgttgcgcataccggcagcgacgcccgcaatcgtgaccatcaacgcctgttcgacgcgaggatcgggcgatttgccctgctcttcagtcagacgggaacgatacagcaattcggcctgcaacacgtttaatggatcggtataaacgtttcttaactgaatggactccgcaatccacggtaagtcggccatcaggtgcgaatcgttggcaatcgccagcaccactttaatgtcttcttccagtaggtctcgtagctctttgcccagcggccaaagcgttttcgccaccaggcgctgatcgtaatagtcggccagccacaggtcggctttcgagaacaccatttccagcatcccaagacgcgtggagaagaacggccagtcgcggcacatggcttccagttcgctttgtttaccgtcttccaccactttttgcagcgcagtacccgcgcccagccaggctggcagcatcaggcggttttgcgtccaggcgaagatccacggaatcgcgcgcagcgattcgacgccgccagttggacgacgtttcgccggacgtgagccgagcggcaatttgcccaactcttgctccggcgtcgcggagcggaagtacggtacaaagtctttattttcgcgcacgtagccgcggtaggtttcacaggagatgacggaaagctcatccataatatgacgccagctgtctttcggttccggcggcggcagcaggtttgcttccagaattgcgctggtgtagagcgagaggctgctgacggtgacttccggcaggccgtatttgaagcggatcatctcgccctgctcggtcacgcgcagaccgcctttcagactgcctggcggttgcgaaagcagcgccgcgtgggctggcgcgccgccacggccaatagatccgccgcggccgtggaagagggtaagctcgatgccggctttttcacaggttttgatcagggcgtcctgcgcctgatactgcgcccatgacgcggccataacgccggcgtctttcgccgagtcggagtagccgatcatgaccatctgcttaccctgaatcagtccgcgataccagtcgatattcaacaactgggtcatcacgtcgtcggcattgttcaggtcatcgagggtttcaaacagcggcgcgaccggcatggcaaagccgatacctgcctctttcagcagcagatgcacagccagcacatcagacggcgttttcgccattgaaattacgtaggcggcgatcgatccttttggcgcttcggcaataaccttgcaggtttcaagcacttcgcgggtatcgttgctcggctcccagttacgcggcagcagcggacgtttggagttcagttcgcggatcaggaaggcctgcttgtcggcttccgaccagctttcgtagtcgccaataccgaggtagcgggtaatttcgcccagcgcttcagtatggcgggtactttcctggcggatatcaatacgcaccagcggtacgccgaaacacttcacgcggcggagcgtgtcgagtaactcgccgttggcgataatgcccatgccgcaggcctgtaacgactggtagcaggcgtacagaggttcccagagctgctcgttttgcgtcagcaggccagccggtttgggcagcttctcgcctttcagacgcgcttccagccaggactgggtcgccatcagacgggcgcgcaattttttcatcaggtagcgatacggctcagacgcgccttcttcgcccactaacgccagcagctccggcgtggcgtcgaccatcgacagttctgataccagaacatgaatgtctttcaggaacagatcggtggctttccagcggcttaacaagagtacgtggcgggtgatatccgccgtcacgttcgggttgccgtcacggtcgccgcccatccaggaggtaaaacgtaccggcacaaaatccaccggcaatttgtagccgagattttcttccagctgttcgttcagttcacgcagatagttaggtacgccctgccacaggctgttctcaaccacggcgaagccccatttggcttcatccaccgggcttggacgctgcttgcggatctcatccgtatgccaggattgggcaatcaactggcgcaggcgacgcattacctggtggcgttcgtagtcggcgatatcggtattatcaagctgttttagacagttgttgatttcacccattttgtgaataagcgtacggcgggtaatttctgtcggatgggcggttagcaccaactccagagacagcgactctaccgcttttttgatggttgcgtcgttgaggtccggttggtttttcagtttgcgcagagtgcgggcaatcacttccgggttgctggcggcttcgccttttggcgaaatgctgtggtattgctcggcagtattggccaggttcaggaactgactaaacgcgcgcgcaactggcagcagctcgtcattagacaaattttgtagcgtggtgagcagctcctggcgattagcttcattgccggcgcgtgaagatttggatagcttacggattgtttctacgcgatcaagaatgtgttctcccagcgcatccttgatggtttctcccagcaccttgccgagcatactgacattactacgcaacgcggaatattgttcgttcatatgaccccagacaccccatctttaatgtaattgccctgtctctttcatgccacagcggcagtggctgcgctcgcccgtatgccagttctgcggaatgggctcgtttgccgccttgctgtgacgtgaaatttttcggactttgctttttagccgtcttttataaagccacgtaaaacccgtggcgtcaattactgcgaaatcggttcagcaaacgaagaaatgacggtaatttattaaagttaattcgcatcgtgccaaataagaaatgcttatgaacatgtggcgtagagacgccggatggcgctgcgcttatccggcctacaagacggggtaggcccggtaaacatcacgtcaccgggcaatatgcattaatgccagcaaaaatggtgtactacctgggtaatcaattcccgggttggcttaataaaacgcgtttcgagatattcatccggctgatgcgcctgattaattgagcccggaccaagcaccagcgttgggcataatgtctgcataaacggcgcttcagtacagtagttcaccacgtcggttttcgttcccaacagtttttctactacttcaaccagttggtggtccggtggacactcataacctggaatcggcggatgtaattccgccaccgtcaggcggcccggccagcgttcgcttaccggggccagcgcgtcgttaagcagtccattaaggtcgtttaacgtcatgcccggcagtggacgaatatccatatgcaattcgcagcaggcgcagatacggtttgaggcatcgccgccgtgaatatggcccagattcagcgttggatacggaacggtaaacgcctcgtagtgataccgcgctttcagcgagtcacgcagttgcatgatatggccaatcgcatcgtgcatcagttcaatggcgttaaccccacgcgccgggtcgctggaatgaccggactgccccaggacgcgaacgacattagagatatgccctttgtgcgcgcgtatcggttgcaacgacgtcggttcgccaatgatcgcgcagtccggacgtaatgccgtggttttggaaaaataacgcgcccccgccatgctggtctcttcatcggcggtcgccagaatgtagagcggctttttcaactttgtgacgtcaacgtcacgtagcgcgtccagaataaaagcgaagaagcctttcatatccgcagtgcccagaccatagagcttattgtcgtgctcggtcagcgtgaacgggtcgcgcgtccagcgtccgtcatcaaagggaaccgtgtcggtatggccggtcagcagcaaaccgcccgcgccatgtccggtgctggcgagcatattaaatttgtttcgcgttcctggaaccggttgaacctctacgttgaaaccaagatcgctgaaccagcctgcaagcaaagtgattaaagacgcattactttgatccagggattcttcggttgcgcttatcgacggtgtggcaatcaaagcgcggtaaatctcgataaatggcggtaaaacgtttttcattgttgacacacctcaggtcatgatagtatcaatattcatgcattaattatgaataaaaatacattaacgttgagcataaaggaacccgatgttgaatacgctgattgtaggcgctagcggttatgcgggcgcagagcttgtaagctacgtaaatcgccacccacatatgaccataaccgctttgaccgtctcagcgcaaagcaatgatgcaggaaagttaatttctgatttacatccgcagttaaaagggattgtcgacctgccattgcaaccgatgtcggatgtacgtgactttagcgcagatgttgatgtggtgttcctggcgacagcgcatgaagtgagccacgatctggcgccgcaatttttacaggccggatgcgtcgtattcgatctttccggcgcgtttcgggtaaacgatcgcgccttctatgaaaagtattacggatttactcatcagtatcctgagctgctggagcaggcggtgtacggtctggcggagtggaatgtcgataaactgaacacggcgaatctgattgcggttcctggttgctatccaaccgcagcgcagttgtcgctaaaaccgctgattgacggcgggcttctcgatctgacgcagtggccggtaattaatgccaccagcggggtgagcggcgcggggcgcaaggcggcaatatcgaacagtttctgtgaagtgagtttgcaaccgtatggcgtgtttacgcatcgtcatcagccggaaatcgccgtccatctgggcgcggaggtcatcttcaccccgcatctggggaatttcccgcgcgggattctggaaaccattacctgccgcctgaaagcgggagtaacccatgcgcaggtcgccgacgtgttgcaaaaagcctatggcgacaaaccgctggtgcgcctgtatgacaaaggcgttccggcgttaaagaacgtcgtcgggctgccgttctgcgatattggttttgccgtccagggcgaacatctgattgtggtggcaaccgaagacaacttgttgaaaggcgcagcggcgcaggcggtgcagtgcgctaatattcgttttggcttcgctgaaacgcagtctcttatttaagggtgaaatgatgaatccattaattatcaagctgggtggcgtattactggatagcgaagaggctctggaacgtctttttaccgcgctggtcaactatcgtgagtcccatcagcgtccgctggtgattgttcacggcggcggttgcgtggtggatgagctgatgaaagggcttaatttgccagtgaaaaagaaagacggcctgcgcgtgacgcctgccgatcagattggcatcattaccggcgcgctggcgggaaccgctaacaaaactctgctggcctgggcgaagaaacaccatatcgcctctgttggtctgtttctgggcgatggcgacagcgtaaacgtgactcaactcgatgaagcgttaggccacgtcgggctggcgcagccggggtcgccgaagctgattaacatgctgctggaaaacggctttctgccggtggtcagctccattggcgtaacagacgacggtcaactgatgaacgtcaacgccgatcaggcggcaaccgcgctggcggcgacgctgggggccgatctgatcctgctttccgacgtgagcggtattctggacggcaaaggccagcgtatcgccgaaatgacggcgtccaaagccgagcagcttatcgaccagggcattattaccgacgggatgattgtgaaagtgaatgcggctctcgatgctgcgcgggcgctggggcgcccggtggatatcgcttcctggcgtcatgcggagcaactgccggcgctgtttaacggcacgccgattggcacgcgtattctggcttaactatttgttcgcccgatggcggctgcgtcttatcgggcctatgtgaacagaaattgtaggccggataagcgtagcgccatccggcagtgaaattcgaagaatttaaggaagtctattatggcactttggggtgggcgttttacacaggcggcagaccagcggtttaaacaattcaatgattcgttgcgcttcgattaccgtctggcggagcaggatattgtcggttctgtggcctggtccaaagcattggtcacggtaggcgtactgactgccgatgagcaacgacagttggaagaagcgctgaacgtgctgctggaagaggttcgcgcgaatccgcagcaaatcctgcaaagcgatgcggaagatatccatagctgggtggaaggtaagctcatcgacaaagtgggtcagttgggtaaaaagctgcacaccgggcgcagccgtaacgatcaagtggcgacggacctgaaactgtggtgcaaagagacggtgagggaactgcttaccgctaaccgccagttacagagcgcgctggtggaaaccgcgcaggcgaaccaggacgcggtaatgccgggatatacccatctgcaacgcgcgcaaccagtgactttcgcccactggtgtctcgcgtatgtcgaaatgctggcgcgcgatgaaagccgcctgcaggacacgcttaaacgtctggacgtgagtccgctaggctgcggcgcgttggcgggaacggcctatgaaattgaccgtgaacaattggcaggctggctgggctttacctctgcgacccgcaacagcctggacagcgtgtccgatcgtgaccacgtactggaactgctttctgatgcggctatcggcatggtgcatctgtcacgcttcgcggaagatctgattttctttaattctggtgaagcgggctttgtagagctttctgaccgcgtgacttccggttcatcgttaatgccgcagaagaaaaacccggacgcgctggagctgattcgcggtaagtgcggtcgcgtacaaggggcgctaaccggcatgatgatgactttaaaaggtctgccgctggcgtataacaaagatatgcaggaagacaaagaagggctgttcgatgcgctcgatacctggcttgactgcctgcatatggcggcgttggtgctggacggtattcaggtgaaacgcccacgttgtcaggacgcggcgcaacaggggtatgccaacgccacggagctggcggattacctggtcgcgaaaggcgtgccgttccgcgaagcgcaccatattgttggcgaagcggtggtagaagctattcgccagggtaagccgctggaagcgttgccgctggccgatttacagaaattcagccgcgtgattggcgacgatgtgtatccgatattgtctttgcagtcgtgtctggataaacgggcggcaaaaggcggcgtttctccgctgcaggtggcgcaggccatcaacgatgcgaaggcgcgcctcgcgttgtaagccttataagcatagcgccatcaggcaatactgcccggccgagcatcagcgacgccgggtttttttacgcaaaaaaaaagcggaccagaggtccgcaaaagttcacgttggctttagttatttcgggttcgagagataccctctgaacgggcggtgtcttcaagggttaaacgagaaaccgctccgttctgtgatgtattattaatcagaaaggttgatagggataatcgttcattgctatgctacctatcgccatgaactatcgtggcgacggaggatgaataatgaatattcgtgatcttgaatatctggtggcgttagccgaacatcgccatttccggcgagcggcggactcctgtcacgtcagccagccaacccttagcgggcaaatacgtaagctggaagatgagctgggcgttatgctgctggagcgtacgagccgtaaggtgctgtttacccaggcgggcttactgctggtggatcaggcgcgtaccgtactgcgtgaggtcaaggtgctcaaggagatggcaagccaacaaggcgagacgatgtccggcccgctgcatattggtttaatcccaacaattggtccctatttgctgccgcttatcattccaatgttgcaccagactttcccgaagctggaaatgtatctgcatgaggcgcaaacgcatcagttgttagcgcaactcgatagcggcaagcttgactgcgctattctggcgctggtgaaagagagcgaggcgtttatcgaagtgccgctgtttgatgagcccatgatgctggctatttatgaggatcatccgtgggcgaatcgcgatcgcgtgccgatgtccgatctggcgggcgagaaattgctgatgctggaagatggccactgtctgcgcgatcaggcgatggggttctgttttgaagcgggagcggatgaagatacccatttccgggcgaccagtctggaaacgctgcgcaacatggtggcggcgggcagtggtattacactactccccgcgctggccgtaccgcaggagcgtaagcgcgacggcgtggtttatctgccatgcattaagccggagccgcgtcgtaccgtggggctggtttatcgcccgggatcgccgctgcgtagccgttatgagcaactggcagaggccatccgtggcgcaatggatggccatttcgacaaggcgttaaaacaggcggtttaagccgttcaacgccgcaacccgataagcttccgccatggttgggtagttaaaggtggtgttaacgaagtattcgatggtgttaccgccacctttctgctccatgatcgcctggccgatatgaataatttcggcggcgcgttcgccaaagcagtgaatccccagaatttctttggtttcgcggtggaagagaatttttagcgtgccgacgttcatgccgacgatttgcgctcgcgccagatgcttaaattgcgcgcggcccacttcgtaaggcactttcattgccgttaactgctgctcggttttgccgacagaactgatttccggaatggtataaatcccggtggggatatcttcgatgagatgcgcggtcgcttcgcctttcaccagcgcctgcgctgcaatacgcccctgatcgtaggcggcggaggccagactgggatagccaatcacgtcgcccaccgcatagacgtgcggcagggcggtctggtacatactgttgactttgagctgtccacggctgtctgtttccagaccaatattctccagcgccagcgaatcggtgttaccggtacggccattagcatagagcaggcagtcagccttcagttttttgccggatttcaggtgcatgatgacgccatcatcgcagccttcgattttctcatactcttcattgtggcgaataaccacgccgctattccagaaatggtaagagagagagtcggacatctcctgatcgagaaaggccagcaggcgatcgcgggtgttgatcagatccactttcacatccataccgcggaagatggacgcatattcgcagccgataacgccggcgccgtaaataataacgtggcgcggttcatggtggagactcaggattgagtcgctgtcataaatgcgcggatgcgagaaatccacatcattgggatggtaaggacgcgaaccacaggcaataacaaatttttctgccgtcagggtttcaaccgtgccgtcatggcattccagcgccagggtatgttcgtcaataaaatgggcgttgccctgcaatatttcacagtggttacgctcataaaacccctgacgcatacgcgtttgttgattaatcacgttatcggcatgattaaggatgtcggcgaaagaagaacgaaggagacgggagtggtcgctatagagcgggttttgattaaattcaataatgcggctgacggcgtggcgaagggctttggatgggatggtgccccagtgggtacatccgccgccaacgttatgataacgctcaatcaccgcgacgcgtgctccttgcttaaccagacccattgcagcgccttcaccgccggggcctgaccctatgacgactgcatcataatcccaggaatgtggcatggtattactcacctgtttttatacataaaataaacacgatgataacatttgcccagctttaacccaattatcgttgtgcttttttgcgaagccggagcacaaactgtctgtaaacaatcattcacaatccagtgtgaacccgttacttttattctctggtatagtgccgaataaggcatatggaaggattcagacattgtgatgggtgttagagcgcaacaaaaagaaaaaacccggcgttcgctggtggaagccgcattcagccaactgagcgctgagcggagttttgccagcctgagtttgcgtgaggtggcgcgtgaagcgggcattgcgccaacgtcgttttaccgtcattttcgcgatgtcgatgaactcggtctgacgatggtggatgaaagcggtctgatgctgcgtcagttgatgcgtcaggcgcgacagcgtatcgcgaaaggcggcagcgtcattcgcacgtcggtctccacatttatggagtttatcggcaacaaccccaacgccttccgtctgttattgcgcgaacgttccggcacttcagcggcgtttcgtgccgccgtcgcacgggagattcagcactttattgcggaacttgccgactatctggaactcgaaaaccatatgccgcgcgcgtttactgaagcccaggccgaagcgatggtaactattgtctttagcgcgggcgcagaggcgttggacatcggcgctgaacagcgtcggcaattagaagagcggctggtattgcaactgcgcatgattgcgaaaggggcgtattactggtatcgccgtgagcaagagaaaatagcacatcattccgaataacgtgaaggacgagtaatgaaacagtcaggtcaagataaaggtacgctgttgctggcgctcatcgctggcttatcgattaacggcacattcgcggcgctgtttagcgctattgtgccgttctccgtattcccgattatctcgctggtgctgacggtatattgcctgcatcagcgctaccaaaatcgtactatgccggtaggtttgccggggttggccgccgcttgtttcattcttggcgttttactgtatagcaccgtcgtgcgtgcagaatatccggatattggctctaatttcttcccggcggtgctgtcggtgattctggtattctggattggctttaaactgcgtaaccgcaagcaggacaccgcggaatagtgtgcgaatgccggatggcggtataaccggccatccgacgtacattttaccttgcggtgagtaataccccgcattccatatgatgtgtatacgggaactgatcgaatagcgccaggcgagacaccgtgtgcgtctggcttaacgtttccaggtttttgcacaacgtttccggattgcaggaaatgtacagaatacgtggataagcctgcaccattttttccgtttcgctgtccagaccgctgcgcggcggatcgacaaaaatggtttcgcactgatagcgcttcaggtcgatcccctgcaggcggttaaactcacgaacgccattcatcgcctgggtaaactcttccgccgccatgcgaataatttgcacattatcaatatgattagcggcaatattgtactgtgcggcagcgacggacggtttggcgatttcggttgccagcacgcggttaaaattgcgcgccagcgctaaagaaaaattgccgttgccgcaatacaactcaagcagatcgccttttgagtctttcgtcacctccagcgcccactctaacatctgaatattcatggcggcgtttggctgcgtaaagctgttttcgacctggcggtagatcatctctttacctgccacaggcagacgctcatcaatataatcctgatccaattcgattttagttttagtggcccggccaatcaggtgtacgttcagaccttgcgcgcgtaaagcatcgcgtaacgcagtggcggcttcacgccactcttcgtccagcttcttatggtacagcaacgacactaccgcctggttgctcaaggtcgtgagataatcgatctggaacagcttatgccgcagtgcatgattatcgcgcacgccggcaatcatcgccttcattaaggtattaatcagttggctggccgccgggaaggtgtcaacgcgaatccggcttttggtctgctgatcaaacataatgtggtacaggtcatcgccgtcatgccacaggcgaaattccgcacgcatacgatagtgactgaccggcgagcgaaatacttccggaaccaggccagaaaacggcgccatcatactctgcaagcgcgccactttttcggccagctgcgcctcatactgttctgtcggaagatgttcgggggtcatatcgcatcctgaataataaaagtacgcggggattgtagggattgctcagtggatgtccagctattgatgatttctgatttgtgatgcgcggtctggacagggtgttgtgacagacggtagcatccgtgggccggtcctgtgagttaatagggaatccagtgaaaatctggagctgacgcgcagcggtaaggaaaggtgagatgagagcgtaagcagacactgcctccggcgggaagtcatcatttctgctatccagccaacggataaccctccaagcccgaagacctgccggctaacgtcgcatctggtttttcatcatcgcgtactatcgatgaagcctgcggcatccttcttatattgtggatgctttacaatgattaaaaaagctacgctgctgacggcgttctccgtcacggccttttccgcttgggcgcaggacactagcccggataccctggttgtcaccgccaaccgttttcagcagccgcgcagcgcggttctggcgcccgttaccatcgtgacgcgtcaggatattgaacgctggcaatcgacctccgtaaatgatgttctgcgccgtttgcctggcgtcgatattgcgcagagcggcggcgccggacaaaactcctccattttcattcgcggcaccaactccagccatgtactggtattgattgacggcgtgcgtctgaatttagcaggcgtgagcgggtccgccgatctcagccagttcccggtgtcgctggtacagcgcattgaatatattcgcggtccgcgctccgctatttatggttccgatgctatcggcggcgtagtgaatatcattacgacgcgcgataacccaggcacagaattaaccgctggatggggaagcaatagctaccagaattacgacatctcgacgcaacagcaacttggcgaaaacacgcgggcgacgttgatcggcgattacgaatacaccaaagggtttgacgtggtagcgaaaggcggtaccgggatgcaggcgcagcctgaccgggacggctttttgagtaaaacgctttatggcgcgttagagcataccttttctgatcgctggagcggattcgtgcgtggttatggctacgataaccgtaccgattacgacgcctattactcgccgggctcgccgctgattgatacacgcaaactttatagccaaagctgggacgccgggctgcactttaatggcgaacgtattcagtctcagctggtttcaagctatagccacagtaaagattacaactatgatccgcactatggccggtatgatacctccgccacgctggatgagatgaaacagtacaatgttcaatggaccaacagtgtggtcgtggggcacggtaatgttggggcgggcgtagactggcagaaacagactaccacgccaggtaccggctatgtgcccgagggatatgaccagcgtaataccggggtttacctgacaggattacaacagttgggtgacttcactctggaagcggcggcgcgcagtgatgacaactcccagtttggtcgtcatggtacatggcaaaccagcgcgggatgggagtttatagaaggttatcgctttattgcctcctacggaacctcctacaaagcgcctaatttgggccaactgtatggttattacggtaatccgaacctgaatcctgaaaagagtaaacagtgggaaggcgcatttgaagggctaaccgctggcgtcagctggcgtatttcaggttatcgtaacgatattaatgacatgatcgattatgacgatcatctgcaaaaatattacaacgaaggtaaggcgcgcattaaaggtattgaggcgacggcgaatttcgataccggaccgttaacgcatacggtcagttatgattacgttgatgcgcgtaatgcgattaccgatacgccattaccccggcgttccaaacagatggcaaaatatcaacttgactgggacgtttacgattttgactgggggatgacatatcaataccttggttcccgctatgattcggattactccgcttacccataccggacagtaaaaatgggcggcgtcagtttatgggatcttacggttgcatatccggtcacctcacatctgacagttcgtggtaaaatagccaacctgttcgacaaagattacgagacagtttatggctaccaaactgcaggacgagaatacaccttgtctggcagctacaccttctgaaccacgtcccaccgtgctggtatttgattccggcgtcggtggattgtcggtctatgatgagattcggcggctcctgccggatctccactatatatatgctttcgataacgtggctttcccctacggggaaaagagtgaaacgtttatcgtcgagcgcgttgtcgagattgtgactgcggtacagcagcgctatcccctttcactggcggtgattgcctgtaataccgccagtacggtctcacttcccgcattacgtgaaaagtttgccttcccggtggtgggcgttgtgcctgcgattaaaccagcggcgcggctgaccgcaaatggcgtcgtcgggctactggcgacgagagccacggtcaaacgtccttatactcacgagctgattgcgcgcttcgccaatgaatgtcagatagcgatgttagggtcggcagaactggtggaactggcggaagctaaattacatggcgattcggtatcgctggaagaactgcgccgcatattacgcccatggctacgaatgccggagccgcctgacacggtcgttctggggtgtacgcatttccctctattacgggacgagcttttgcaagtcctgcccgaagggacgcggttagtggattccggcgcggcgatagcgcgtcgtacagcctggctgttggaacatgaagcgccggatgcgaaatcaaccgatgccaatattgcttattgcatggcaatgacgccaggagctgaacaattattacccgttttacagcgttatggctttgaaacgctcgaaaaactgccggtttaatggcgttttgggtaaataccaggcacttgagaaattattttaaatttcctcttgtcaggcagaaataactccctataatgcgccaccactgacacggaacaacggcacacaggccgccgggtcaccggggttcagaccagaacctcacggagaaaagcgaaaataaacgcttgactctgaagcgggaaagcgtaatatgcacaccccgcgccgctgagaaaaagcgaagcggcactgctctttaacaatttatcagacaatctgtgtgggcactcgaagatacggattcttaacgtcctaggacgaaaaatgaataccaagtctcaagagtgaacacgtaattcattacgaagtttaattcattgagcatcaaacttttaaattgaagagtttgatcatggctcagattgaacgctggcggcaggcctaacacatgcaagtcgaacggtaacaggaagcagcttgctgcttcgctgacgagtggcggacgggtgagtaatgtctgggaaactgcctgatggagggggataactactggaaacggtggctaataccgcataacgtcgcaagaccaaagagggggaccttcgggcctcttgccatcagatgtgcccagatgggattagcttgttggtgaggtaacggctcaccaaggcgacgatccctagctggtctgagaggatgaccagccacactggaactgagacacggtccagactcctacgggaggcagcagtggggaatattgcacaatgggcgcaagcctgatgcagccatgccgcgtgtatgaagaaggccttcgggttgtaaagtactttcagcggggaggaaggtgttgtggttaataaccgcagcaattgacgttacccgcagaagaagcaccggctaactccgtgccagcagccgcggtaatacggagggtgcaagcgttaatcggaattactgggcgtaaagcgcacgcaggcggtctgtcaagtcggatgtgaaatccccgggctcaacctgggaactgcattcgaaactggcaggcttgagtcttgtagaggggggtagaattccaggtgtagcggtgaaatgcgtagagatctggaggaataccggtggcgaaggcggccccctggacaaagactgacgctcaggtgcgaaagcgtggggagcaaacaggattagataccctggtagtccacgccgtaaacgatgtctacttggaggttgtgcccttgaggcgtggcttccggagctaacgcgttaagtagaccgcctggggagtacggccgcaaggttaaaactcaaatgaattgacgggggcccgcacaagcggtggagcatgtggtttaattcgatgcaacgcgaagaaccttacctggtcttgacatccacagaagaatccagagatggatttgtgccttcgggaactgtgagacaggtgctgcatggctgtcgtcagctcgtgttgtgaaatgttgggttaagtcccgcaacgagcgcaacccttatcctttgttgccagcgattaggtcgggaactcaaaggagactgccagtgataaactggaggaaggtggggatgacgtcaagtcatcatggcccttacgaccagggctacacacgtgctacaatggcgcatacaaagagaagcgacctcgcgagagcaagcggacctcataaagtgcgtcgtagtccggattggagtctgcaactcgactccatgaagtcggaatcgctagtaatcgtggatcagaatgccacggtgaatacgttcccgggccttgtacacaccgcccgtcacaccatgggagtgggttgcaaaagaagtaggtagcttaaccttcgggagggcgcttaccactttgtgattcatgactggggtgaagtcgtaacaaggtaaccgtaggggaacctgcggttggatcacctccttaccttaaagaaacggtctttgaagtgctcacacagattgtctgatgaaaaacgagcagtaaaacctctacaggcttgtagctcaggtggttagagcgcacccctgataagggtgaggtcggtggttcaagtccactcaggcctaccaaattttccctgaatactgcgttgtgaaataactcacatactgatgtatgcttcgttattccacgccttgtctcaggaaaaattatcggtaaagaggttctgactacacgatggggctatagctcagctgggagagcgcctgctttgcacgcaggaggtctgcggttcgatcccgcatagctccaccatctcgtgagtgtttacgaaaaaatacttcagagtgtacctgaaagggttcactgcgaagttttgctctttaaaaatctggatcaagctgaaaattgaaacacagaacaacgaaagttgttcgtgagtctctcaaattttcgcaacacgatgatgaatcgtaagaaacatcttcgggttgtgaggttaagcgactaagcgtacacggtggatgccctggcagtcagaggcgatgaaggacgtgctaatctgcgataagcgccggtaaggtgatatgaaccgttataaccggcgatttccgaatggggaaacccagtgtgattcgtcacactatcattaactgaatccataggttaatgaggcgaaccgggggaactgaaacatctaagtaccccgaggaaaagaaatcaaccgagattcccccagtagcggcgagcgaacggggaggagcccagagcctgaatcagcatgtgtgttagtggaagcgtctggaaaggcgcgcgatacagggtgacagccccgtacacaaaagcgcatgtgctgtgagctcgatgagtagggcgggacacgtggtatcctgtctgaatatggggggaccatcctccaaggctaaatactcctgactgaccgatagtgaaccagtaccgtgagggaaaggcgaaaagaaccccggcgaggggagtgaaaaagaacctgaaaccgtgtacgtacaagcagtgggagcacaggtttacctgtgtgactgcgtaccttttgtataatgggtcagcgacttatattctgtagcaaggttaaccgtataggggagccgtagggaaaccgagtcttaaccgggcgttaagttgcagggtatagacccgaaacccggtgatctagccatgggcaggttgaaggttgggtaacactaactggaggaccgaaccgactaatgttgaaaaattagcggatgacctgtggctgggggtgaaaggccaatcaaaccgggagatagctggttctccccgaaagctatttaggtagcgcctcgtgaattcatctccgggggtagagcactgtttcggctagggggccatcccggcttaccaacccgatgcaaactgcgaataccggagaatgttatcacgggagacacacggcgggtgctaacgtccgtcgtgaagagggaaacaacccagaccgccagctaaggtcccaaagtcatggttaagtgggaaacgatgtgggaaggcccagacagccaggatgttggcttagaagcagccatcatttaaagaaagcgtaatagctcactggtcgagtcggcctgcgcggaagatgtaacggggctaaaccatgcaccgaagctgcggcagcgaacgtatcacccaagacaactttacggagttgacgattgacggagcgaagcgacgtcaaagcgttcattaaagtcgagttggcttagggatacgttcgttgggtaggggagcgttctgtaagcctgtgaaggtgtgtcgtgaggcatgctggaggtatcagaagtgcgaatgctgacataagtaacgataaagcgggtgaaaagcccgctcgccggaagaccaagggttcctgtccaacgttaatcggggcagggtgagtcgacccctaaggcgaggccgaaaggcgtagtcgatgggaaacgggttaatattcccgtacttggtgttactgcgaaggggggacggagaaggctatgttggccgggcgacggttgtcccggtttaagcgtgtaggtgtgtgttccaggtaaatccggttcactttaacactgaggcgtgacgacgaggcactacggtgctgaagcaacaaatgccctgcttccaggaaaagcctctaagcatcaggtaacacgaaatcgtaccccaaaccgacacaggtggtcaggtagagaataccaaggcgcttgagagaactcgggtgaaggaactaggcaaaatggtgccgtaacttcgggagaaggcacgctgacacgtaggtgaagtgatttactcatggagctgaagtcagtcgaagataccagctggctgcaactgtttattaaaaacacagcactgtgcaaacacgaaagtggacgtatacggtgtgacgcctgcccggtgccggaaggttaattgatggggtcagcgcaagcgaagctcctgatcgaagccccggtaaacggcggccgtaactataacggtcctaaggtagcgaaattccttgtcgggtaagttccgacctgcacgaatggcgtaatgatggccaggctgtctccacccgagactcagtgaaattgaactcgctgtgaagatgcagtgtacccgcggcaagacggaaagaccccgtgaacctttactatagcttgacactgaacattgagccttgatgtgtaggataggtgggaggctttgaagtgtggacgccagtctgcatggagccgaccttgaaataccaccctttaatgtttgatgttctaacgtggacccgtaatccgggttgcggacagtgtctggtgggtagtttgactggggcggtctcctcctaaagagtaacggaggagcacgaaggttggctaatcctggtcggacatcaggaggttagtgcaatggcataagccagcttgactgcgagcgtgacggcgcgagcaggtgcgaaagcaggtcatagtgatccggtggttctgaatggaagggccatcgctcaacggataaaaggtactccggggataacaggctgataccgcccaagagttcatatcgacggcggtgtttggcacctcgatgtcggctcatcacatcctggggctgaagtaggtcccaagggtatggctgttcgccatttaaagtggtacgcgagctgggtttagaacgtcgtgagacagttcggtccctatctgccgtgggcgctggagaactgaggggggctgctcctagtacgagaggaccggagtggacgcatcactggtgttcgggttgtcatgccaatggcactgcccggtagctaaatgcggaagagataagtgctgaaagcatctaagcacgaaacttgccccgagatgagttctccctgagacttagagtctcctgaaggaacgttgaagacgacgacgttgataggccgggtgtgtaagcgcagcgatgcgttgagctaaccggtactaatgaaccgtgaggcttaaccttacaacgccgaagatgttttggcggttaagagaagattttcagcactgattcagagttgagtacgcaataatttgcgcagcagcgaggcggcaagcgaaggaaaggaaggagcatacagaagtatgtgactgactttacgagcgcaggcaacgccgctgatgcgataaagaattgcgtacagagcacaaagaatttgcctggcggcactagcgcggtggtcccacctgaccccatgccgaactcagaagtgaaacgccgtagcgccgatggtagtgtggggtctccccatgcgagagtagggaactgccaggcatcaaataaaacgaaaggccctgtcggaagacagggccttttgtttttgtctgtttctgccggatggcggctccgccttatccggcctacagggacgcgccgatctaccctcattataaccacaagccttcccaacacagatacggtaaactattgccgattgagtatcaggaaagcagccatgacccactccctaaaaccctggaataccttcggcattgatcattgtgcaaagcacatcgtatgcgctgaaaacgaacaacaactactgagcgcctggcagcaagcaactcgtgagggactgccggttatgatcctgggtgaaggaagcaatgtcctgtttctggaaaattacgccggcaccgtgatccttaaccgcctgaaaggcattgaggtcaatgaaaccgcggacgcctggcacctacacgtcggcgcaggcgaaaactggcatcagctggttcgctacgcgctggacaacaacatgcccggcctggagaatctggcgctcatccctggctgcgttggttcctcgcctatacagaatattggcgcgtatggcgtagaactacagcgcgtctgcgactacgttgactgcgttgaactggaaacgggaaaacgtctgcgtttgtccgcggcggaatgccgtttcggctatcgtgacagtatcttcaaaaatgaatatcaggatcgcgttgcgatcgtcgcggtgggtctgcgtttgtcaaagcaatggcagccggtgttgacctatggcgatcttacttgtttggacccgaaaacggtcaccgcgcaacaggtgtttgatgctgtatgccatatgcgcaccacaaaattgccggatcctaaagtgaatggcaatgcgggcagcttttttaaaaatcccgttgtcgcagccgatatcgctatggaactgttagaacgatttcccaacgcgccgcattaccctcaggcagacggctcagtgaagctggcggcaggctggctgatagatcaatgtcagttgaaaggcgtcaccattggcggcgctgcggtgcatcgccaacaggcgctggtattgattaatgcgaatgatgcgacaagtaaagatgtggtggcgctggcgcatcatgtccggcaaaaagtgggtgaaaaatttaatgtctggctggagcctgaggttcgctttattggtcggtccggagaggtgaacgctgtggagagcattgcatgaaagatactaccgttcccctgacgctgatctcactacttgccgacggagagtttcactcaggcgagcagttgggtgaacggctgggaatgagccgcgcggctattaataaacatatccagacattacgcgactggggagtagatgtatttaccgttcccgggaaaggatatagcttaccggaacccatccagttactggatgctgaccgtatacatagccaactggatagcggaaacgtggcggtattgcccgttatcgattcaaccaatcagtatttacttgatcgaattggcgagctgcgctcaggcgatgcctgtgtagcagaataccaacaggcggggcgtggtcgtcgcgggcgtaaatggttctcaccgtttggcgcgaatctatatctttcaatgtactggcgtctggagcagggccctgcggcggcaataggcctgagtctggtcattggaattgtgatggcggaagtgctgcgtaaactgggcgcagataaagttcgtgtgaagtggcctaacgacctttacctactggaccgcaaactggcgggtattctggtcgagttaaccggtaaaacgggcgatgccgcacaaatagtgattggcgctggtattaacatggcaatgcgtcgcgtagaagaggacgtgataaatcagggatggatcacactacaagaggccggaattacgctcgaccgcaatatgctggccgcaaagctgatttataagctacgtgctgcgcttgagctttttgagcaagaaggtctttctccttatctttcgcgctggaaaaaactggataattttattgatcgcccggtaaaactaattattggtgacaaagaaatatttggtatttctcgcggcattgatactcaaggcgcattattgcttgaacaggatggcgtgattaaaccctggatgggcggagaaatatcgctgcgaagcgccgaatagtaaaaagggggagtcggtactccccttttttctgttatttccgcaatcttacctgttccaccgcatggttagcgctcttggtcataataaggctggcacgttctcgtgtaggtaagatattttgttttaaattcaaccagttaatttctttccaaagcgaagttgctgtattaacagcttcttctttagataatttcgcataattgtggaaataagagtcaggatcggtaaacgccccttcgcggaatttcaggaagcgattgatataccacgtctgaagaagttcttctggcgcatccacgtaaatagagaaatcaacgaaatcagagacaaatacatgatgcggatcgtgaggataatccataccgctttgtaaaacattcaaaccttcaagaatcaatatatcaggctgagcgacggttttatccccttcaggaataacatcgtaaatcaaatgagaatagactggcgccgtcacgttcggtacgcccgacttgaggtcagaaacgaatttcaccagtcggtgcatatcatacgattcggggaacccctttttcttcattaacccgcgttctttcaacacctggtttgggtggaggaagccgtctgtggtaatcaattcaacacggcggtgttccggccagcgactcagcaacgcttgcagaacgcgtgctgtcgtgcttttacccactgcgacgctgcccgcgatactgatgatgtaagggattcgctggccgttagtgcccagaaactgttccaggacagcctgacgacgcagatttgaactgatatagaaatttagcaaacgggagagaggtaaatatatttctgcaacttcttccagcgataaatcttcattaatgccttttaactgcgcgatctcatcctcggtcagggtcatcggcacagaatcgcgaagcgcagcccactggctgcgatcaaactgtaggtaaggcgtcattaacgattgctcttttatactcataagcatgtttctggctgctattgctacatcagttcagcgatgaacgagggccatccctgacatgcaacggcacgtcacatttaagttaatttggacaatgggcaggagggtaacaccagatggggaggaataataagaaaaaatctcgctgtgaaagctatccctgagaagcaatgtgacgaatataccagatacagaagattgctttctatcgacggagcgttgaaatgccgcgtcgtatcctggtcagacggtcggtaaaatgccgaaaatttatgctctcttgtttgaaattagagcatttttgtctcttatagcgcaaaatgtgagcgatagaacattttatgcaattttttagttgcatgagcacgcaggtctccatagaatgcgcgctacttgatgccgacttagctcagtaggtagagcaactgacttgtaatcagtaggtcaccagttcgattccggtagtcggcaccatcaagtccggtggggttcccgagcggccaaagggagcagactgtaaatctgccgtcacagacttcgaaggttcgaatccttcccccaccaccattttcggccgcgcgatggcgcagcccgagacgataagttcgcttaccggctcgaataaagagagtttctctcgatattcagtgcagaatgaaaatcaggtagccgagttccaggatgcgggcatcgtataatggctattacctcagccttccaagctgatgatgcgggttcgattcccgctgcccgctccaagatgtgctgatatagctcagttggtagagcgcacccttggtaagggtgaggtcggcagttcgaatctgcctatcagcaccacttcttttctccttcctgtttttctcttctgtttattagcattcaacaagtcgggcgtgttgcctggttgatgtggtgatatcaccgatttatccgtgtcttagagggacaatcgatgtctaaagaaaagtttgaacgtacaaaaccgcacgttaacgtcggtactatcggccacgttgaccatggtaaaacaacgctgaccgctgccattactaccgtactggctaaaacctacggcggtgccgctcgcgcattcgaccagatcgataacgcgccggaagaaaaagcgcgtggtatcaccatcaacacttctcacgttgaatacgataccccgacccgccactacgcacacgtagactgcccggggcacgccgactatgttaaaaacatgatcaccggtgctgctcagatggacggcgcgatcctggttgttgctgcgactgacggtccgatgccgcagacccgtgagcacatcctgctgggtcgtcaggtaggcgttccgtacatcatcgtgttcctgaacaaatgcgacatggttgatgacgaagagctgctggaactggttgaaatggaagttcgtgaacttctgtctcagtacgacttcccgggcgacgacacgccgatcgttcgtggttctgctctgaaagcgctggaaggcgacgcagagtgggaagcgaaaatcatcgaactggctggcttcctggattcttacatcccggaaccagagcgtgcgattgacaagccgttcctgctgccgatcgaagacgtattctccatctccggtcgtggtaccgttgttaccggtcgtgtagaacgcggtatcatcaaagtgggcgaagaagttgaaatcgttggtatcaaagagactcagaagtctacctgtactggcgttgaaatgttccgcaaactgctggacgaaggccgtgccggtgagaacgtaggtgttctgctgcgtggtatcaaacgtgaagaaatcgaacgtggtcaggtactggctaagccgggcaccatcaagccgcacaccaagttcgaatctgaagtgtacattctgtccaaagatgaaggcggccgtcatactccgttcttcaaaggctaccgtccgcagttctacttccgtactactgacgtgactggcaccatcgaactgccggaaggcgtagagatggtaatgccgggcgacaacatcaaaatggttgttaccctgatccacccgatcgcgatggacgacggtctgcgtttcgcaatccgtgaaggcggccgtaccgttggcgcgggcgttgttgctaaagttctcggctaatcgctgataacatttgacgcaatgcgcaataaaagggcatcatttgatgccctttttgcacgctttcacaccagaacctggctcatcagtgattttatttgtcataatcattgctgagacaggctctgtagagggcgtataatccgaaaggcgaataagcgtttcgatttggattgcctcgcgattgcggggtgaaaatgtttgtagaatacttctgacaggttggtttatgagtgcgaataccgaagctcaagggagcgggcgcggcctggaagcgatgaagtggatagttgttgccatattgctgatcgtcgcaatcgtcggcaactacctctatcgcgacatgatgctgccgctgcgtgcgctggccgtagtaattctgattgctgcagcgggtggtgtcgcgctgttgacgacaaaaggtaaagcaaccgttgcttttgcccgtgaagcgagaaccgaagtccgtaaggtcatttggccgactcgccaggaaacgctgcacaccacgctgatcgtcgctgcggttaccgcagttatgtcactgatcctgtggggactggatggtattctggttcgcctggtatcctttatcactggcctgaggttctgagatgtctgaagcacctaaaaagcgctggtacgtcgttcaggcgttttccggttttgaaggccgcgtagccacatcgctgcgcgagcatatcaaattacacaatatggaagagctgtttggcgaagtcatggtgccgactgaagaagtcgttgagatccgtggcggccagcgtcgcaaaagcgaacgcaaattcttcccgggttacgttctggtccagatggtcatgaacgacgcaagctggcacctggtgcgcagcgtgccgcgtgtgatgggctttatcggcggtacctctgaccgtccggcgccgatcagcgacaaagaagtcgatgcgatcatgaaccgcctgcagcaggttggcgataagccgcggccgaaaactctgtttgaaccgggtgaaatggttcgtgttaacgacggtccgttcgcagactttaacggcgttgtcgaagaagtcgattatgagaagtctcgcctgaaagtgtctgtttctatcttcggtcgtgcgaccccggtagagctggacttcagtcaggttgagaaagcgtaaggctgcgatcaaaaaagcagcgatctaatcgttgcatagggcgcgaaattgacatacaatttcgcgccttttgtttttatgggccttatgcccataaagcgatatttatcacggggagcttctttgaagcgatactacccaattcgaggaatttagaatggctaagaaagtacaagcctacgtcaagctgcaggttgcagctggtatggcgaacccgagtccgccggttggtccagcactgggtcagcagggtgtgaacatcatggaattctgcaaagcgttcaacgcaaaaacggattccatcgaaaaaggtctgccgattccggttgttattaccgtttacgctgaccgttctttcaccttcgttaccaaaacgcctccggcagctgttctgctgaaaaaagcggctggtatcaagtctggttccggcaagccgaacaaagacaaagtaggtaaaatttcccgcgctcagctgcaggaaatcgcgcagaccaaagctgccgacatgaccggtgccgacattgaagcgatgactcgctccatcgaaggtactgcacgttccatgggcctggtagtggaggactaagaaatggctaaactgaccaagcgtatgcgcgtgatccgtgaaaaagttgatgcgaccaaacagtacgacatcaacgaagctattgccctgctgaaagagctggccactgctaaattcaacgaaagcgttgacgttgccgttaacctcggcatcgacgctcgtaaatctgaccagaacgttcgtggcgcgactgtactgccgcacggtactggccgttctgttcgcgttgccgtatttacccaaggcccgaacgctgaagcagctaaagctgctggcgctgagctggtaggtatggaagatctggctgaccagatcaagaaaggcgaaatgaacttcgacgttgttatcgcatccccggatgcaatgcgcgttgttggccagctgggccaggttctgggtccgcgcggcctgatgccaaacccgaaagtcggtaccgtaactccgaacgttgctgaagcggttaagaacgctaaagcaggtcaggttcgttaccgtaacgacaaaaacggcatcatccacaccaccatcggtaaagtggactttgacgctgacaaactgaaagaaaacctggaagctctgctggttgcgctgaaaaaagcaaaaccgagccaggcgaaaggcgtgtacatcaagaaagttagcatctccaccaccatgggtgctggcgttgccgttgatcaggctggtctgagcgcatctgcgaactaagattagtctttacgtgggcggtgattttgtctacaatcttacccccacgattctgttgaaatataacagagcactatgcgagtcatttgaattgcagcaaggcagcaagtgagtgagtcgccaggagcatagttaactatgtgactggtgtgaacgagcgcagctaacacagctgcggttcaaaggacgaagtcatagaaagaatttgttcgttggagcctggcctatccaggcctccgtcgaagaccgcaggcgtctcgcaagaggcttaatcccctgcgtagacggtgacagaacgctaagattattttttatactctggcttgtttctgctcaccgtattaagacgctcttctcgttgagatgagtgaagtgagttccggaacatgagttccggcaaacatccaggagcaaagctaatggctttaaatcttcaagacaaacaagcgattgttgctgaagtcagcgaagtagccaaaggcgcgctgtctgcagtagttgcggattcccgtggcgtaactgtagataaaatgactgaactgcgtaaagcaggtcgtgaagctggcgtatacatgcgtgttgttcgtaacaccctgctgcgccgcgtcgttgaaggtactcagttcgagtgcctgaaagacacgtttgttggtccgaccctgattgcatactctatggaacacccgggcgctgctgctcgtctgttcaaagagttcgcgaaagcgaatgcaaaatttgaggtcaaagctgcagcctttgaaggtgagctgatcccggcgtctcagatcgaccgcctggcaactctgccgacctacgaagaagcaattgcacgcctgatggcaaccatgaaagaagcttcggctggcaaactggttcgcacactggctgctgtacgcgatgcaaaagaagctgcgtaatcgcagttgtctttatcaagcatttgcttacgtataaacttattctgatattcaggaacaatttaaatgtctatcactaaagatcaaatcattgaagcagtatccgctatgtccgtaatggacgttgtagaactgatttctgcaatggaagaaaaattcggtgtttccgctgctgctgctgtagctgtagctgctggcccggctgaagctgctgaagaaaaaactgaattcgacgtaattctgaaagctgctggcgctaacaaagttgctgttatcaaagcagtacgtggcgcaactggcctgggtctgaaagaagctaaagacctggtagaatctgctccggccgctctgaaagaaggcgtgagcaaagatgacgctgaagcactgaaaaaatctctggaagaagctggcgctgaagttgaagttaaataagccaacccttccggttgcagcctgagaaatcaggctgatggctggtgactttttagtcaccagcctttttgcgctgtaaggcgccagtagcgtttcacactgtttgactactgctgtgcctttcaatgcttgtttctatcgacgacttaatatactgcgacagagcgtacgttctgtgtaaatcgcaatgaaatggtttaagcgtgatagcaacaggcattgcggaaagtatccattttccggtcaacaaaatagtgttgcacaaactgtcccccgcaggacagatgggtcgacttgtcagcgagctgaggaaccctatggtttactcctataccgagaaaaaacgtattcgtaaggattttggtaaacgtccacaagttctggatgtaccttatctcctttctatccagcttgactcgtttcagaagtttatcgagcaagatcctgaagggcagtacggcctggaagcagccttccgttccgtgttcccgattcagagctacagcggtaattccgagctgcagtacgtcagctaccgccttggcgaaccggtgtttgacgttcaggaatgtcagatccgtggcgtgacctattccgcaccgctgcgcgtaaaactgcgtctggtgatctacgagcgcgaagcgccggaaggcaccgtaaaagacattaaagaacaagaagtctacatgggcgaaattccgctcatgaccgacaacggtacctttgttatcaacggtactgagcgtgttatcgtttctcagctgcaccgtagccctggcgtcttctttgactccgacaaaggtaaaacccactcttcgggtaaagtgctgtataacgcgcgcatcattccttaccgtggttcctggctggacttcgaattcgatccgaaggacaacctgttcgtacgtatcgaccgtcgccgtaaactacctgcgaccatcatcctgcgtgcgctgaactacaccactgagcagatccttgacctgttctttgagaaagtcgtcttcgaaattcgcgacaacaaactgcagatggagctgattccagaacgtctgcgtggcgaaaccgcgtcgttcgatatcgaagctaacggcaaagtgtacgttgaaaaaggccgtcgcattaccgcgcgtcacatccgtcagctggaaaaagacgatatcaagcatatcgaagttccggttgagtacatcgcaggtaaagtcgtctctaaagactacgttgacgaatctactggcgagctgatctgcgcggcgaacatggagctgagcctggatctgctggctaagctgagccagtccggccacaagcgtatcgaaacgctgtttaccaacgatctggaccacggcccgtacatttctgaaacggtacgcgtcgacccaactaacgatcgtctgagcgcgctggtagaaatctaccgcatgatgcgccctggtgagccgccgacacgcgaagcggctgaaagcctgtttgagaacctgttcttctccgaagaccgctatgacctgtctgcggtgggtcgtatgaagttcaaccgttctctgctgcgcgacgaaatcgaaggttccggtatcctgagcaaagacgacatcattgatgtcatgaagaagctcatcgatatccgtaacggtaaaggcgaagtggatgatatcgaccacctcggcaaccgtcgtatccgttccgtcggcgaaatggcggaaaaccagttccgcgttggcctggtgcgtgtagagcgtgcggtgaaagagcgtctgtctctgggcgatctggataccctgatgcctcaggatatgatcaacgccaagccgatttccgccgcagtgaaagagttctttggttccagccagctgtctcagtttatggaccagaacaacccgctgtctgagattacgcacaaacgtcgtatctccgcactcggcccaggcggtctgacccgcgaacgcgcaggcttcgaagttcgagacgtacacccgacgcactacggtcgcgtatgtcctatcgaaacgccggaaggtccgaacatcggtctgatcaactccctgtccgtgtacgcacagactaacgaatatggcttccttgagacgccgtaccgtcgtgtggttgatggcgtggttactgacgaaattcattacctgtctgctatcgaagaaggcaactacgttatcgctcaggcgaactccaacctggatgacgaaggccactttgtagaagatttggtgacctgccgtagcaaaggcgaatccagcttgttcagccgcgaccaggttgactacatggacgtttccacccagcaggtggtctccgtcggtgcgtccctgatcccgttcctggaacacgatgacgccaaccgtgcattgatgggtgcgaacatgcaacgtcaggcggttccgactctgcgcgctgacaagccgctggtgggtaccggtatggaacgtgctgtcgccgtcgactccggtgttactgcagtagctaaacgtggcggtactgttcagtacgtggatgcgtcccgtatcgttatcaaagttaacgaagacgagatgtacccgggcgaagcgggtatcgacatctataacctgaccaaatacacccgctctaaccagaacacctgtatcaaccagatgccatgtgtgtctctgggcgagccggttgaacgcggcgacgtgctggcagacggtccgtccaccgacctcggtgaactggcgctcggtcagaacatgcgcgtggcgttcatgccgtggaacggctacaacttcgaagactccattctcgtttccgagcgtgttgtccaggaagaccgtttcaccaccatccacattcaggaactggcgtgcgtgtcccgtgacaccaagctggggccggaagagatcaccgctgatatcccgaacgtgggtgaagctgcgctctccaaactggatgaatccggtatcgtttacatcggcgcggaagtgacaggcggtgacattctggtcggtaaggtgacgccgaaaggtgaaacccagctgacgccggaagagaaactgctgcgtgcgatcttcggtgagaaagcgtctgacgttaaagactcttctctgcgcgtacctaacggtgtctccggtacggttatcgacgttcaggtctttactcgcgatggcgtagaaaaagacaaacgtgctctggaaatcgaagagatgcagctcaagcaggcgaaaaaagacctgtctgaagaactgcagatcctcgaagcgggcctgtttagccgtatccgtgcggtgctggtttccagcggcgttgaagctgagaagctcgacaaactgccgcgcgaccgctggctggaactcggtctgaccgacgaagagaaacaaaatcagctggaacaactggctgagcagtatgacgaactgaaacacgagttcgagaaaaaacttgaagcgaagcgccgtaaaatcacccagggcgacgatctggcgccgggcgtgctgaagatcgtgaaggtctatctggccgttaaacgccgtatccagccgggtgataagatggcaggtcgtcacggtaacaagggtgttatctctaagatcaacccgatcgaagacatgccttacgatgaaaacggcacgccggtagacatcgtactgaacccgctgggcgtaccgtctcgtatgaacatcggccagattctggaaacccacctgggtatggctgcgaaaggtattggcgacaagattaacgccatgctgaaacagcagcaggaagtcgcgaaactgcgcgaattcatccagcgtgcctacgatctgggcgccgacgttcgtcagaaagtcgacctgagcaccttcagcgatgatgaagtgctgcgtctggcagaaaacctgcgcaaaggtatgccgattgccacaccagtgtttgacggtgcgaaagaagcggaaatcaaagagctgctgaaactgggcgacctgccgacctccggtcagatcaccctgttcgatggccgtacgggtgaacagttcgaacgtccggtaaccgtcggttacatgtacatgctgaaactgaaccacctggttgatgacaagatgcatgcgcgttctaccggttcttacagcctggttactcagcagccgctgggtggtaaggcgcagttcggtggtcagcgcttcggggagatggaagtgtgggcgctggaagcttacggcgccgcctacaccctgcaggaaatgctcaccgttaagtctgatgacgtgaatggtcgtaccaagatgtataagaacatcgtggacggcaaccatcagatggaaccgggtatgccggaatccttcaacgttctgttgaaagagatccgctcgctgggcatcaacatcgaactggaagacgagtaattctcgctcaaacaggtcactggtgtcggggtaaaacccgacaccagattgtgctaactccgacgggagcaaatccgtgaaagatttattaaagtttctgaaagcgcagactaaaaccgaagagtttgatgcgatcaaaattgctctggcttcgccagacatgatccgttcatggtctttcggtgaagttaaaaagccggaaaccatcaactaccgtacgttcaaacctgagcgtgacggccttttctgcgcccgtatctttgggccggtaaaagactacgagtgcctgtgcggtaagtacaagcgcctgaaacatcgtggtgttatttgtgagaagtgcggcgttgaagtgacccagaccaaagtacgccgtgagcgtatgggccacatcgagctagcgtccccgactgctcacatctggttcctgaaatcgctgccgtcccgtatcggtctgctgctcgatatgccgctgcgcgatatcgaacgcgtactgtacttcgaatcttatgtggttatcgaaggcggtatgaccaacctggaacgtcaacagatcctgactgaagagcagtatctggacgcgctggaagagttcggtgacgaattcgacgcgaagatgggggcggaagctatccaggccctgctgaagagcatggatctggagcaagagtgtgaaactctgcgcgaagagctgaacgaaaccaactccgaaaccaagcgtaaaaagctgaccaagcgtatcaaactgctggaagccttcgttcagtctggcaacaagccagagtggatgatcctgaccgttctgccggttctgccgccagatctgcgtccgctggttccgctggatggtggtcgtttcgccacgtcagatctgaacgatctgtatcgtcgcgtcattaaccgtaacaaccgtctgaagcgtctgctggatctggctgcgccggacatcatcgtacgcaacgaaaaacgtatgctgcaggaagcggttgacgccctgttggataacggtcgtcgcggtcgtgcgatcaccggttctaacaagcgtcctctgaaatctttggccgacatgatcaaaggtaagcagggtcgtttccgtcagaacctgctcggtaagcgtgttgactactccggtcgttctgtaatcaccgtaggtccatacctgcgtctgcaccagtgcggtctgccgaagaaaatggcgctggagctgttcaaaccgttcatctacggcaagctggaactgcgtggccttgccaccaccatcaaagccgcgaagaaaatggttgagcgtgaagaagctgtcgtttgggatatccttgacgaagttatccgcgaacacccggtactgctgaaccgtgcaccgactctgcaccgtctgggtatccaggcatttgaaccggtactgatcgaaggtaaagctatccagctgcacccgctggtttgtgcggcatataacgccgacttcgatggtgaccagatggctgttcacgtaccgctgacgctggaagcccagcttgaagcgcgtgcgctgatgatgtctaccaacaacatcctgtctccggcgaacggcgaacctatcatcgttccgtctcaggacgtggtattgggtctgtactacatgacccgtgactgtgttaacgccaaaggcgaaggcatggtgctgactggcccgaaagaagctgagcgtatctatcgcgcaggtctggcctctctgcatgcgcgcgttaaagtgcgtatcactgaatatgaaaaagatgaaaacggcgaattcgttgcgcacaccagcctgaaagacacgaccgttggtcgcgccattctgtggatgatcgtaccgaaaggtctgcctttctccatcgtcaaccaggcgctgggcaagaaagcgatctccaaaatgctgaacacttgctaccgtattctgggcctgaaaccgaccgttatttttgcggaccagacgatgtacaccggctttgcttatgcagcgcgttcaggtgcgtccgttggtattgatgacatggtcatcccggagaaaaaacacgagatcatctctgaggcggaagctgaagttgctgagatccaggagcagttccagtctggtctggtaaccgctggcgaacgctataacaaagttatcgatatctgggctgcggcgaacgatcgtgtatctaaagcgatgatggataacctgcaaaccgaaaccgtgattaaccgtgacggccaggaagagcagcaggtttccttcaacagcatctacatgatggccgactccggtgcgcgtggttctgcggcacagattcgtcagcttgctggtatgcgtggtctgatggcgaagccggatggctccatcatcgaaacgccaatcaccgcgaacttccgtgaaggtctgaacgtactccagtacttcatctccacccacggtgcgcgtaaaggtctggcggataccgcactgaaaaccgcgaactccggttacctgactcgtcgtctggttgacgtcgcgcaggatctggtagtgaccgaagatgactgtggtacgcacgaaggtatcctgatgaccccggttatcgagggtggcgacgtgaaagagccgctgcgtgaccgcgttctgggtcgtgtgacggcggaagatgtgctgaaaccgggtaccgcggacattctggttccacgcaacacgctgctgcacgaacagtggtgtgacctgctggaagcaaactccgttgacgccgttaaagtgcgttctgttgtatcctgcgacaccgactttggtgtatgtgcgcactgctatggccgtgacctggcgcgtggccacatcatcaacaaaggtgaagctatcggcgttatcgcggcacagtccatcggtgaaccgggtacacagctgacgatgcgtacgttccacatcggtggtgcggcatcgcgtgcggctgctgaatccagcatccaggttaagaacaaaggtagcatcaagctcagcaacgtgaagtcggttgtgaactccagcggtaaactggttatcacttctcgtaacaccgaactgaagctgatcgacgaattcggtcgtaccaaagagagctataaagtgccttatggcgctgtcatggcgaaaggtgatggcgagcaggttgccggcggcgaaaccgtggcaaactgggacccgcacaccatgccggttatcaccgaagtgagtggtttcatccgcttcactgacatgatcgacggtcagaccattacgcgtcagaccgacgaactgaccggtttgtcttcgctggtggttctggattcggctgaacgtactaccggtggtaaagatctgcgtccggcgctgaaaatcgttgatgctcagggtaatgacgttctgatcccgggtaccgatatgcctgcgcagtacttcctgccgggtaaagcgattgtacagctggaagatggcgtacagatcagttctggtgacaccctggcgcgtattcctcaggaatccggcggtaccaaggatatcaccggtggtctgccgcgcgttgcggacctgttcgaagcgcgtcgtccgaaagaaccggccattctggcggaaatcgcaggtatcgtttccttcggtaaagaaaccaaaggcaaacgtcgtctggtgattacgccggttgatggtagcgatccgtacgaagagatgattccgaaatggcgtcagctcaacgtgttcgaaggggaacgtgtagaacgtggtgatgtgatttccgacggtccggaagcgccgcacgatattctgcgtctgcgtggtgttcatgctgtgacgcgttacatcgttaacgaagtccaggatgtataccgtctgcagggcgttaagattaacgataaacacatcgaagttatcgttcgtcagatgctgcgtaaagcgaccatcgaaagcgccggtagttccgacttcctggaaggcgaacaggttgaatattcccgcgtcaagatcgctaaccgcgagctggaagcgaacggcaaagtgggggctaccttctcccgcgatctgctgggtatcaccaaagcgtctctggcaaccgaatcgttcatctctgccgcatcgttccaggagaccacgcgtgtcctgaccgaagcagccgttgcgggtaaacgcgacgaactgcgcggcctgaaagagaacgttatcgtggggcgtctgatcccggcgggtaccggttatgcgtaccaccaggatcgtatgcgccgtcgcgccgcgggcgagcagccagcaacaccgcaggtcactgcggaagatgcatctgcaagcctggcagaactgctgaacgcaggtctgggcggttctgataacgagtaatcgttaaatggtggaggggtatttatccctccaccagcttcatgctggataccgaattccgggtcgcttgcctacaaggaaagaaaatgccagcgattatttcattaatctatttaatgtttagtcttttagtatttacaaaaaagataaccatttcaaacgttctgtccgcttttttattgtttctatcgttatatatacttcaccataaatcattacttatatttatttattgtcttattattattgtcgccaccgctattcttcatcgagtcaaaaccagcgcggataaaaaagccgtattttatttttcaatgccatgctggctcttggttttatctgtaattataaatattaatgaataaatgaattattttttcatgactcttgtttctcgtattattggtgaaaaatcattatcactggttatatgaataaattgtccagtttttgtattatattttgccatcgcacagggaagactattaccaccgttagccataacaaattttgcttttgtattacgataaagattgacgccaggaatggggtcttgaccgaatgtataaggcgttgggacaattacattatgtttgtttgagagccactttactaaaatcccgccaacgccatcaaccggcgtaataaaagtagagaatccacaatactcaaaattgaaattttttatcattgggtttgtttttttctgtaacattgattccaaatgtgactttaaatttatcccataaatctaagttattaaagtctattggctcgccattataaaatacctgctgttcatacattaaatgataaacctgttttattgattgtttacgcgggacattttaaattattaaatgaaggatttaattccattaaggtctttgtttgctcttattacaggaattataaatatgatgccatttctggaataaaagtaaagttaataaattatttatttaattgctcactggtagggtatttatgtatcctccggttaatgcttagtttagcatcttttagctgacagcgattgcaacgctaaaaaacatgtgctaataatcatcatgtaaaatatgtaatgaagtaagtatggagcatttaattgttatgatcccaccattaaatagatatgttcccgcgctttcaaaaaatgaattggttaaaactgttaccaacagggacattcagtttacaagttttaatggaaaagattatcccttgtgctttttagatgagaaaacccctcttcttttccagtggtttgagcggaatcctgctcgctttgggaaaaatgatatacctataattaacacagagaaaaacccctaccttaacaatatcattaaagcagcaacaattgaaaaagaacgtcttataggtatttttgtagatggtgatttttttccgggacaaaaggatgctttttcaaaacttgagtatgactatgaaaacataaaagtcatatatagaaatgatattgactttagtatgtacgataaaaaattatcagaaatttatatggaaaatatttctaagcaagagtccatgccagaagaaaaaagggattgtcatttactgcagctattgaaaaaagaattgagtgatattcaagagggtaatgattcattaattaaatcttacttactggataaaggccatggatggtttgatttttacaggaatatggctatgttaaaggctggtcagttatttttggaggcggataaggttgggtgttatgatttatcaacaaatagtgggtgtatatatcttgatgctgatatgattatcacggaaaaactggggggtatatatattccggatggaatcgctgttcatgtagaaaggatagatggccgtgcttctatggaaaacgggataatagctgttgatcgcaataaccacccggctttacttgctggattagaaataatgcatactaaatttgatgctgatccctattctgatggtgtatgtaatggaattagaaaacattttaattattctttaaatgaagattataattctttttgcgattttattgagtttaagcatgataacattataatgaataccagtcagtttacgcaaagttcatgggcgaggcatgtgcagtagcggaaatggcaataatcatgctattgaatacataaaatattggcataaactatcaagtttcggcgaaaaatatttgttgctcagttttctctactacaacgccactttaaaatcgcagtgctgttcagaacggagatatacggcattccttgtgaaatatgggagtaagaagagcttaaataatttaattggttattaaataacaattttatttatacagatatctgtcagattacatctggcttaaatttttgtcagcccagatgcgttttccatcaagtaacgttaccatcggcgtccggccgcaacacatttttccctgatgggttcgcccctgattcccgttgttctggggcatcattttatggacaaaaacgatcagcagacacggttggaagaggggccgccagcgaaattacagtcaggaacgctgcccgaaaacttcaagttcaccgctatttcgataatccagtggccagcccccggtcgtcagttactgatgaaggggtgaaggctgggcaataatgaggaagggatactttgccttggtcagcttccgttgctgacgatgacaaaataaaaaaacgggaggtcgataacaatctcccgtttttcgcattacgtactcgttcgtgaaatactaatgcgtttacatacgggttcaccgcgtttgcgaagcgcgccccagccaactgtcccagtctttccagacgggctgcaatccttgcgcgcttaacgcgcttgctactgtttcaggccgacgggcatcgtggggagaaaactgctccagttccggatgatcgtcagcgtagccgccgggctgcgtttttgagaaggcgctgacgttgttgattgccagaggaatcacatggtctcgaaaccacggcgattcgcgggtggagagtgataattcaatttccggcgccaataaccggaaagcgcaaatcgtttgcaccagttgcttttcatccatcacagatgcgggttccacaccgccagtacacggacgcagacgcgggaaggaaacagaatagcgactctgccagtagtgtttctgcatccacaacagatgctccgccaccatatagcaatccacccgccagttgtccgacagaccaattagcgcgccaagaccgattttgtcgatacctgcccggcctaaccgatccggcgtttccagccgccagaaaaagtcctgtttctttcccttcaggtgatgctgtgcatagattgcctcatgataagtctcctgataaaccatcacgccatcgatccccagtgttttgagctccgcatagttttcttgcgacaagggctggacttccatctgtaaagaggaaaattgacggcggatggtgggtaaatgacggcgaaaatagtccatgccgactttggcctgatgttcgccggtgactaacagcagatgctcaaagcccagtttacggatagcatcgcattccctttgaatatccacctcatccagcgttttacgcttaatgcggttgctcatcgaaaaaccgcagtaggtacagtcgttggcacagaggtttgagagataaagcggcacgtagaaactgacggtgttgccaaagcgttgtcgggtcagcctttgcgcccgctgcgctatcggttccagataatcggcggcggcgggggagagcagtgccatcaaatcatcccggctaagatgcgcggcgttcagcgcacgttccacgtcagcggcggttttaccattgatgcgcaggcgaatatcgtcccactccagttgccgccaacggtcggtgaaggttttcatgctaacgcctccagaaatccggtgagcgggctggtggcgttggcgtaggtgctacgattacccggcaccgcctgacgcgccagtactcccgcttctacagccaggcggaaagcggttgccatcattaccggatcgtccgccacggcaatcgccgtgttgaccagcaccgcatcagcgcccatttccagcgcctgcgccgcatggctgggcactccaatgcccgcatcaaccaccaccggcacggtggactgctggataataatctccagcatcgctttggtttccagcccctgattcgaaccgataggcgcgccgagcggcatcaccgccgcgcagccgacctcttccagccgcttgcacaacaccggatccgcgccgcagtagggcagcaccacaaaaccctgcttcaccagcgcctcggcggcttttagcgtttcgatcggatccggcagcagccagcgggcgtccggatggatttctaatttcagccagtgggttcccagcgcttcgcgcgccagttgggcggcgaagattgcctcttcggcggttttcgccccggaggtattgggcagcagcgtgacgcccgcttcaatcagcggcgccaggatagcgtcgttgtgctgacgtaaatccacgcgcttcatcgccagtgtcaccaactggctgccggaggcgcgaattgcctcgaccatcagttgcgatgaggcaaacttcccggtaccggtgaacagatgtgaatcaaacgttttgtcggcaatacgtaacatatcaaccccctgcaataacctgaaaaaacaggatctggtcgccttcctgcacgatttgctgctgccactgctcgcgcggcaggatctgctgattgagcgccagcgccgcgcccggtttaagctgattgagttgcgtgagcagctcactgacggtttgccctgcggcgcactgcatcggttcatcattgaactgaatctgcatgttgccctccgcagaccggacagccgctggcatgacgcagcgccaggctgcgccactggctggttttgccgtcaaacaggcgtagctctccgctgggcgtctcaataccgctgagtaatttgattgcctccagcgcctgcaaggtgcccatcacgccaacaaccggtccgacgataccggcggtacggcagttgcgttcaggctcgacatcgtccggccacaggcagcggtaacagccttgttcccacggtggtgtgaggaccattagctggccgccaaagccgacggcgctggcggaaattaacggagtgttgagcgccacacaggcggcgttaatctcctggcgcgtcgccatgttatcggtacagtcgagcactacgtcggcgtgtgctaccgcgtttttaagcacatcgccagtcagacgttgttgcaatacgatcagcttgctaccggggttgagctgcgccagccgtagttttgccgcctgcgccttcgggtgggcgatatcgtcggtggtgaacagaatttgccgctggagattgctcaagtgaacatcgtcatcgtctaccagcgttagtttgccgatgcctgctcccgccagatacagcgcggcaggcgaacccaatccgcctaagccgacaatcaatacatggctattgagcaacttttgctggccttcaatcgcgatatcgccgagcaggatctggcggctataacgcataaaatcatggtcattcatcgccgactcctgcgattgccagcagctctgcagtggcttcacgccagtctgcggcctgagtaatagcgctgaccacggcaatgctgccgacgccggtcgccagtaccgccggagcgcgttcaaggctgatgccgccaattgccacggtcgggtaatccgccagtcgttcaatatgactggccagctgcgccagcccctgcggggcggaaggcatctgcttggtttgcgtggggaagacatgacccagcgcgatataagaaggcttagcggcgagcgcgacgtctatctccatatcatcgtgggtcgatacgcccaggcgtaagcccgccgcttgaatcgctttcaggtcggtggtttcaaggtcttcctggcccagatgcacgccgtaagcgcggtgcttaattgccagacgccagtaatcgttgataaacagccgggcgttataacgacgccccagcgcgatggcggcgataacgtcggcttccacctcttcatcgcgtttatctttgatacgcaactggatcgtgcgcacgcccgactccagtaaacgctcaatccattcaacgctgtccaccaccgggtaaagcccgaggcggaacggcacggtggggaaatcaggctgatacatcaggcttcctcccgcttgagataaatttcgccgcctttggcgcggaagtcctctgacatatccgccatgccgatttcaatagtttgtgcggcggcgtagtcgcggacctcctggctgattttcatcgagcagaacttcggcccgcacatggagcagaagtgggcaaccttgccggactcctgcggcagggtttcatcgtgataagcgcgggcggtgaacgggtcgagcgcgaggttaaactgatcttcccagcggaattcaaagcgcgctttcgacatggcgttatcgcggatctgcgcgcccggatgtcctttggctaaatccgcggcgtgggcggcgattttgtaggtgattagcccctgcttcacatcttctttgttcggcaggccgaggtgttctttcggcgtcacataacacagcatcgcgcagccaaaccagccgatcatcgcggcaccgatcccggaggtgaagtggtcatagcccggcgcgatatcggtggtcaatggccctaaggtgtagaacggtgcttcatggcagctctccagctcttcggtcatgttgcgctggatcatatgcatgggtacgtggcccgggccttcaatcatcacctgcacgtcgtattcccaggcgattttggtcaattcgcccagcgtatgcagctcggagaactgcgcttcgtcgttggcatcctgaatggagccggggcgcaggccgtcgcccagcgacaaggagacgtcgtaggcggcgcaaatttcacaaatctcgcggaaatgttcgaacaggaagttctctttgtgatgggagagacaccactttgccatgatggaaccgccgcgtgagacaatcccggtcaggcgtttggcggtcattggcacgtagcgcagcagcacgcccgcgtgaatggtgaagtagtcgacgccctgttcagcctgctccagtagcgtgtcgcggaacgcttcccaggtaagatcttcggcgatcccgttgaccttctccagcgcctggtagatcgggacggtgccgatcggtaccgggctgttacgcaggatccattcgcgggtttcatgaatatagcgaccggtggagaggtccatcaccgtgtccgcgccccagcgggttgaccacaccagtttttccacctcttcttcgatggaggaggtgaccgccgagttaccgatgttggcattcactttgaccaggaagttgcggccgataatcatcggctccgattccgggtggttgatgttggcgggaataatcgcgcggcccgcggcgacttcatcacgcacgaattccggcgtaatgttttccggcaggcgcgcgccaaagttcatccccggatgctggtggcgcagcacttcactgcgaatgcgctcacggcccatattttcacggatggcgatgaactccatttcgggagtgacgatccccttgcgggcgtagtgtaactgggtgacgcgcttgcccgctttagcgcgttttggcgtcagcaggccggtaaaacgcagatcgtccaggccatcgtcggccagacgttctctggtataagccgagctacggtcgtctaattcttcgctatcgttacgtgcgtcaatccatggctggcgcagtttcgccagaccctgctggacgttaatcgccacctcaggatcgccataggggccggaggtgtcgtataccggtacggcttcgttctcttcaaactgcgggttgtctttactgccgccgatgagcgtggggctaagttgaatttcgcgcatcggtacgcgaatatcatgctgcgaaccggtcacgtagatgcgtttcgagttgggaaacgcggtgccttccagcgtatcgataaaatgctgggctttagcgcgctgctcgcggcgggttaacgttgttgtagacatagctcattccaaaaaattaaggacgtggcttgtcagacgacggatggagtaatggatgtgcgccgcccgtaaaggcagcagcataaagcagaattactcttgttcccttcgcaggtattaacctgatcaggttccgcggatcccgaattaacggtctcagccttttccacttcatccttcgcgctgcctcttcgttggcttcgtccgctcactccagtcacttacttatgtaagctcctggagattcaccgacttgccgccttgacgcatcacgaacgcttttgtggaaaattagcactccgacaagataaccgcccctccgaagagggggctgaagtaaactacccgttactcgcgcagaactcaagcgggacgtttgactctggcgccgtcgtgcatcgcgtcaaacaccagcataatcagcttgtcttccagcacaaagcgggcttccagcgcttcgccgatatctgacagagcttgttgaaattcgagacaattatcgtgatcgatggcagtttccaggctggtgtcgtaataatccataatgcgctgcgtattatcttccagcagcggccagatttttgccgcatgtaaaagctgaccgtttccttccaatttatggagaatacgttcataaatactgaagtgcccggcggaaaggtaatcgaccaggctctgacaaaaatcatccagcgctttttcattcagccgcatgtacgattctttgccaggcttaatgccaaccagattgtagtaagccacgagcaggtgcttacgtacatccagccagcgatcgaccagtttgttgcttccgccaacgcgctccgtcaggttttccagctggtttagcatgattgtctccgcaagttagataaaggctgctcgccatgaatgtaaaaataatgttaacaacatgccagtgaagcaaaggtagtgcaatagctatggatcgtataattgaaaaattagagagtggctggtggatcgtcagccatgaacaaaaattatggttgccgtatggggaattaccacacgggctggcggcaaatttcgatcttgtggggcagcgcgcactccggataggtgaatggcaaggcgagcccgtttggctggtgttacagcatcgacgtcatgatatgggatcggttcgccaggttatcgatcaggaggccgggttgttccaactggcgggacgtggcgtacagttggcggagttttatcgttcgcataaattttgcggctattgcgggcaccctatgcacccgagtaaaaccgaatgggcgatgctgtgcagccattgccgcgagcgttactacccgcaaatcgccccctgcattattgttgccattcgccgtgaggattccatcctgctggcccagcacgttcgccaccgcaacggcgtgcataccgtgctggccgggtttgttgaagtcggcgaaaccttagaacaggcggtcgcgcgagaggtaatggaggagagcgggattaaggtgaaaaatctgcgctatgtgacttcccagccgtggcctttcccgcagtcgttgatgaccgcttttatggcggagtatgacagcggcgagattgtcatcgacccgaaagaactgttggaagcaaattggtaccgttatgacgatctgccgctactaccgccaccgggcaccgtcgcgcgccgtttgatcgaagatacggtggcaatgtgtcgggctgaatatgattgacatgttacactgggcgcatcaacgctaaaggaatgtaaaaatgaccgaactcaaaaacgatcgttatctacgtgcgctgctgcgccagcccgttgatgttacgccagtgtggatgatgcgccaggcgggccgttatctaccggagtacaaagccactcgcgctcaggcgggcgattttatgtcgctgtgcaaaaatgccgaactggcctgcgaggtcactttacagccgctgcgccgttatccgcttgatgcggcgatccttttctcggatatcctgacgattccggacgcgatgggcctggggctctattttgaagctggggaaggcccgcgctttacagcccctgtcacctgcaaagccgacgttgaaaaactgccgattccggatccagaaggtgaactgggctacgtgatgaatgcggtgcgtacgattcgccgcgaactaaaaggcgaggttcctctgatcggcttctccggcagcccgtggacgctggcgacttacatggtggaaggcggcagtagcaaagccttcacggtgattaaaaagatgatgtacgctgacccgcaggcgttgcatctgctgctggataagttggcgaaaagcgtcacgctgtacctcaacgcgcagattaaagcgggtgcgcagtcggtgatgattttcgatacctggggcggcgtgctgactggccgcgattaccagcaattctccctctactacatgcataaaatcgtcgatggcctgctgcgtgaaaacgacggtcgccgggtgccggtaacgctgttcactaaaggtggcggtcagtggctggaggcgatggcggaaaccggctgcgacgcgctgggtctcgactggacgacagatatcgccgatgcgcgccgtcgcgttggccataaagtggcgctgcagggcaatatggacccctcgatgctgtatgcgccgccggcacggatcgaagacgaagtagcgactatacttgctggtttcggtcagggagaagggcacgtctttaaccttggacatggcatccatcaggatgtgccgccagaacatgctggcgcatttgtggaggcagtgcaccgactttctgcgcagtatcacaactaaggagttagcatggatctcgcgtcgctacgcgctcaacagatagaacttgcttcatcggtttgccgcgaagatcggttggacaaagatccgccagcgtttatcggcggggcggacgtcggttttgagcagggcggcgaggtgacgcgggcggcgatggtattgctgaaatatccgtcgcttgaactggtagagtacaaggtggcgcgtattgccaccaccatgccgtatatccccggctttctctcttttcgtgaatatcctgcgctgctggcggcgtgggaacagctctcgcaaaagcccgatttgctgtttgtggacggtcacggtatttcgcatccgcgtcggcttggcgtcgccagtcattttggactgttggtggacgtgccgaccatcggcgtggcgaaaaaacggctatgcggtaaatttgaaccactttccgccgaacctggcgcacttagccccttaatggataaaggcgagcaactggcgtgggtatggcgcagcaaggcgcgctgtaatccgctgtttatcgcgacagggcaccgggtcagtactgacagcgcgctggcgtgggtacagcgctgtatgaaagggtatcgcctgccggagccgacgcgctgggcggatgccgtcgcttccgggcgtccggcgtttgttcgttggcaagaaattcagcgctgattcaggtaaactgccgctaatttccgattcgagattccatcatgttacaaaacccgattcatttgcgtctggagcggctggaaagctggcagcacgttacctttatggcctgcttgtgcgagcgcatgtacccgaactacgccatgttttgcaagcagacggaattcggcgacggacagatctaccgtcgcattctggatctgatctgggaaaccctgacggtgaaagatgcgaaggtcaatttcgatagccaactggagaagtttgaagaggcgattccggcagccgacgactatgatttgtacggcgtttacccggcgattgatgcctgcgtcgcattaagcgaattaatgcattctcgtcttagcggcgaaacgctggaacacgctattgaggttagtaagacttccattactacggtagcgatgttggaaatgactcaggctggtcgggaaatgaccgatgaggagctcaaaacgaaccctgccgttgaacaggaatgggatattcagtgggaaatattccgacttttagccgactgcgaagaacgtgatattgaactgataaaagggctcagggcagacctgcgcgaggctggcgagagcaatatcggtataaattttcagcaatgacaccagaaaacgtgatttaacgtctgatttgtcgtgccataaggcttcccttatgccccccgtctggtctacatttgggaggcgaaaaaaagtggctatcggtgcgtgtatgcaggagagtgcttttctggcatttccgtcgcactcgatgcttagcaagcgataaacacattgtaaggataacttatgaacaagactcaactgattgatgtaattgcagacaaagcagaactgtccaaaacccaggctaaagctgctctggaatccactctggctgctattactgagtctctgaaagaaggcgatgctgtacaactggttggtttcggtaccttcaaagtgaaccaccgtgctgagcgcactggccgtaacccacagaccggtaaagaaatcaaaatcgccgccgctaacgtaccggcgtttgtttctggtaaagctctgaaagacgcagttaagtaagacgcataactgtgaacagttttatcgaaggggctcatcagccccttttgtctgtctggcgtcgcgcgtttctgttttctggcgcgctgttgctgactgcctgcagtcataacgcttcaccgcctccgtttactgccagcggctttgccggcgatcacggcgcggtgcgtatctggcgtaaagatacgaacgatgaagtccatctgctttctgtttttagcccgtggcatagcggcagcacgacgaccagcgaatatcgttggcagggtgatacgctttcgcttattgaactcaatatttacagcaaaccgccagaacatattcgcgcgcgtttcgacgctcatggcgaactcagttttatgcagcgtgaagtcggggggcagaagcagcagctttccaacgatcagattgccttgtatcgctatcgcgccgaacaaatccgtcagaccagcgacgccttgcgcctggggcgggtcatactacgccagggacgctggcacgccgaccatacggtaaccacctgtgaaggtgaaacgctgaaaccggatctggattcctgggcaataagccacattgagcgccgccagaaccactcatcggtagaggtgagcgtagcatggctggaggcgccggaaggatcgcaacttttgctggtggcgaattcagatttttgtcactggcagccgcaagcgaaaagcttttgatggaataccggatggcgaagccgccattcggcaaacatgctttaccagtttcccatacccatgtgaccgccgccgcgatgataaccgccgccatagccgccgcaaccgccatagcccattcctgcgccgcgtggtatgccagcctgcgccatcgcgacatcccgtttcacgcgttgctcatctaacttctggcctaatgactccatctctttggcaaccgcgttaattttcgcagtatccggcgaactggcggtcagtagcgcgttgtattcataacgtttggatatcagttgctggcgcagcgcgctggtctgcgtatagtaatcatcataaatcttctgcgccgtcgcctgctgttccgtagttaacgggctacctccctgttgccacataccgtcattgttgccccagtgatgcccggcgaaggcggcgccggagctcagggccaaaagagagagggcaattagcgcgatagctgatttattgttccgtttcattttgcgttctcctgttgctcatcttatcctctctcttgcatcttccgtgccaggtaactattccttgtcgggcagcgagttaacccgcttcaggcggcaaaaagcgagtaaaaatgactcgcataacccgcctggcgagtcatttttacccatccgtatccgaaagggtgtgcgacaacgcgcggttatgcggagcgaagaatggcatgatctctgcttaagtaaggaaaataaaaacgagccggggaagcctgtgagttttatacgattacataaagatgccgctgcaacgtggttgagtcgactgttacctgcggcgatcttcattctggtggggctattttccattatggtcattcgcgactatggccgtgagagcgctgccgccaggcagacgctgctggaaaagggaaatgtactcattcgcgctctggagtccggcacgcgagtaggtatgggaatgcggatgcatcacgcgcagcagcagacattgctggaagagatggcgggtcagccaggcgtgttgtggttcgccgtaacggatgcgcagggggtaatcatcactcatagcaaccctggcatggtgggcaaatcgctctattccccatctgaaatgcatcaactaaaccccgggccgcaggagcgttggcggcgtgtcgacgttgctgctaacggcgagacggtgcctgcgctggaaatttaccgtcagttccagccgcttttcggtatgagaggtcacggtatgagggggcacggcatggcgcgtagcgccaatgacgacgaaccagcgaaacaaactatttttattgcctttgacgccagcgagctggccgcgacacaggcaagggagtggcgtaatacgctgattgttttgtctgcgttagcggcggtgctgttggcaacgttactggcgtttttttggcatcagcgttatcagcgctcgcacagagaactgcttgatgcaatgaagcgtaaagaaaagctggtggcgatggggcatctggcggcgggcgtcgcgcacgaaattcgtaacccgctctcgtccatcaaagggctggcgaaatactttgccgagcgcacgcctgccggcggcgagtcgcatgaactggcgcaggtgatggccaaagaggccgaccgtttgaaccgggtggtaagcgaattgctcgaactggtaaagcccgcgcatctgacgctccagacggttaacctcaatgatattattactcactccctgaatctggtcagtcaggatgcccaaagcagagagattcagttgagattcacggcgaatgagacgcttaagcgtattcaggctgacccggacaggctgactcaggtgctgttgaatctgtacctgaacgctattcatgcgattggccgccagggaacgattagcgtagaggcaaaagaaagtgggaccgaccgcgttatcatcactgttaccgatagcgggaaagggatcgccccggatcagctggaggcgatttttacgccttattttacgaccaaagctgacgggacaggcctggggctggctgtggtgcaaaatatcatcgaacagcatggcggcgcgattaaggtgaaaagtattgagggtaaaggcgcggtctttactatctggttgccagtgatagcgagacaacaggattaacaagggtgatacgcggaaaaatcgatattctggttgtggatgatgatgtaagccactgcacgattttacaggcgctgcttcggggctggggctataacgtcgctctggcctacagtgggcatgatgcgttggctcaggtgcgtgagaaagtctttgatctggtactgtgcgatgtgcgtatggcggagatggacggtatcgccacgctgaaggagattaaagcgctcaatcccgccattccgattttgattatgacggcattttccagcgtggaaacggcggtagaggcgttgaaagccggcgcgctcgactatttaattaaaccgctggattttgaccgtctgcaggagacgctggaaaaggcgttggcgcatacgcgggaaacgggcgctgaattgccatcggcgtcggctgcgcagtttggcatgattggcagcagtccggcgatgcaacatttactgaatgaaatcgcgatggtcgcaccatcagacgccacggtattgattcacggagactccggcacgggtaaagagctggtggcgcgggcgctacacgcctgtagcgccaggagcgatagaccgctggtcacgctcaactgcgccgcgcttaatgaatcgctgctggagtccgagctgttcggacacgaaaaaggcgcgtttaccggcgcggataaacgtcgggagggacgctttgtcgaagctgacggcgggacattgtttcttgatgaaatcggcgatatctcgccgttaatgcaggtacgtttgctgcgggcgattcaggagcgcgaagtgcaacgcgtgggaagtaaccagacgatatctgtggatgttcggttaattgccgctacccaccgcgacctggcggaagaggtgagtgccggtcgctttcgccaggatctctattaccgcctgaatgtggtggcgattgaaatgccttctttgcgccagcgtcgggaagatattccgctactagcagaccattttctgcggcgttttgccgaacgtaaccgcaaagtggtgaaggggtttacgccgcaggcgatggatctgctgatccactacgactggccgggcaatatccgtgagctggaaaacgctatcgagcgggcggtggtgttgctgacgggagaatacatttctgaacgcgaattgcctctcgctattgccgcgacgccgataaaaacggaatacagtggtgagatccaaccgctggtggacgttgaaaaagaggtgattctggcggcactggaaaaaacgggcggcaacaaaacggaagccgcccgtcaattgggcattacgcgcaaaacgctgctggctaaactcagccgttagttttgctcacgctcaatggcgcgccagccaatgtcgttacggctgaagctgccgtcccagcggatgtcggtcatcagggcgtaagcgcgtttctgcgcctcagccacggtgtggcccagcgcggtggcgcacagtacgcggccgccgctggtcaacacgcggtcgtcatcggcgagtttggtgcccgcgtggaaaactttaccgtcagccacttcttccagcggcaggccgtggatctcgtcgccggtgctgtagctgcccggataaccgcccgcggcgatcaccacgcctaatgaagcgcgttcgtcccactcggaggttttctcatccagcttgccgtcgcaggcggccaggcaaagatccaccaggtccgacttcatgcgtagcatgatcggctgggtttccggatcgccgaagcggcagttgaactcgataactttcgggttgccctgcttgtcgatcatcagacccgcgtacaggaagccggtataggtattcccttctgccgccatgcctttcacggttggccagatgatccgttccatggtgcgctggtggacttcatcggtcaccactggagccggagagtaagcccccatgccgccggtgttcgggccggtatcgccgttgcctacgcgtttgtgatcctggctggtggccatcggcagcacgtgctcgccgtcgaccatcacgataaagcttgcctcttcgccgtcgaggaactcctcaatcacgatacggtggcccgcgtcgccaaaggcgttgcctgccagcatgtcatgaacggcggcttcggcttcttccagcgtcatcgccacgataacgcctttaccggcagccagaccgtcagctttgatgacgatcggcgcgcctttctcacgcagataagccagggctggctcaatctcggtgaaattctggtattccgccgtcggaatctggtgacgagcgaggaaatctttggtgaaggctttggagccttccagttgggcggccccttcggttgggccaaagatcttcagacccgccgcgcggaacgcatcgaccacgccaatcaccagcggcgcttccgggccaacgatggtcaggtcaatcttctcgtgctgggcaaagctcagcagcgccggaatatcggtgacgccgatagccacgttctgcaacgcgggctccagcgcggtaccggcgttacccggtgcgacaaaaacagtatcaaccagcggcgactgtgcggctttccaggccagcgcgtgttcgcgtccgccgttaccaatcactaatactttcatgtttcgctccattaatggcggaagtggcgcatgtcagtgaagatcatcgcaataccgtgttcgtcggcagcggcaatcacttcgtcatcacggatagaaccgccaggctggatcacacagctcacgccaacggcggcagcggcatcaataccgtcacggaacgggaagaacgcgtcggaggccatcgcggaacctttcacttccagaccttcgtcagccgctttaatgccagcgattttcgcggagtacacgcggctcatctggcctgcgcctataccgatagtcatgttctctttcgcatacacaatggcgttggatttcacgaacttggcgaccttccagcagaacagcgcatcgcgcagctcctgctcggtcggctggcgtttagagaccacgcgcagttcagcttcgctcaccatacccagatccctgtcctgaaccagcaggccgccgttaacacgcttgaagtccagacccggcacacgctgtgcccactgaccgcaggtcagaacgcgaacgttctgtttggcggcggtgattttcagcgcctcttcggttgcggacggggcgatgatcacttccacgaactggcgggagataatggcctgcgcggtttcggcatccagttcgcggttgaaggcgataatgccgccgaacgcggaggttgggtcggttttatacgcacggtcgtaagcgtcgagaatagtggtgctcaccgccacgccgcacgggttagcgtgcttgacgattacgcaggctggctcgttgaactctttcacacactccagcgccgcgtcggtatcagcgatgttgttgtaagaaagcgctttgccctgaacctgctgtgcggtggcaacggacgcttctttcacattttcttctatatagaaggctgcctgctggtggctgttctcgccatagcgcatatcctgcttcttaatgaagttcagattcagcgtacgcgggaagcgaccggcggcttctttgctttcaccgtggtaggccggaaccatgctgccgaagtagttagcgatcatgctgtcgtaggcggcggtgtgttcgaaggctttaatcgcgagatcgaaacgggtgtcgagggtcagagaaccttcgttagcatccatctctttaataatggcgtcgtagtcgctgctcttcaccacgatggccacgtctttatggttcttagcagcagagcgcaccatggtcgggccgccgatatcaatgttctctaccgcatcttccagcgagcagccttcgcgtgccacggtctcggcgaacggatacaggttaacgacaaccatatcgataggggcgatgtggtgctgttccataatggcatcgtcctggccgcgacgaccgaggatgccgccgtggacttttggatgcagggtctttacgcgtccatccatcatttccgggaaaccggtgtaatcggaaacttcggtcaccggcaggcctttttctgctaacaggcgggcggtgccccccgtagacagcagctccacaccgcgtgcggaaagtgcctgggcgaattcgatgataccggccttgtcagaaacactgagcagagcgcggcggactggacgacgttgttgcatggtaaatcccctggatttgacgattacagagagcgttagctgaatttttcgtgaaaaactcagctaacgccccttatggggtattctcattttgcggcgacattgtaacgaaaacgtttgcgcaacgctcgcgaatttttctttttaaattctggccccgcttttatccctgaaagatcatttgcagagtgagaagatccaggagatgaacgcgcattttgtggataagtctgtgcgtaaatgggtataaccaggggttttgctggggaatgcagcaaacagtcatttttctgcaatttttctattgcggtcagcagagaactccctataatgcgcctccatcgacacggcggatgtgaatcacttcacacaaacagccggtcggttgaagagaaaaatcctgaaattcagggttgactctgaaagaggaaagcgtaatatacgccacctcgcaacggtgagcgaaagccgcgttgcactgctctttaacaatttatcagacaatctgtgtgggcactcgaagatacggattcttgacgtcgcaagacgaaaaatgaataccaagtctcaagagtgaacacgtaattcattacgaagtttaattctttgagcatcaaacttttaaattgaagagtttgatcatggctcagattgaacgctggcggcaggcctaacacatgcaagtcgaacggtaacaggaagcagcttgctgcttcgctgacgagtggcggacgggtgagtaatgtctgggaaactgcctgatggagggggataactactggaaacggtggctaataccgcataacgtcgcaagaccaaagagggggaccttcgggcctcttgccatcagatgtgcccagatgggattagctagttggtgaggtaacggctcaccaaggcgacgatccctagctggtctgagaggatgaccagccacactggaactgagacacggtccagactcctacgggaggcagcagtggggaatattgcacaatgggcgcaagcctgatgcagccatgccgcgtgtatgaagaaggccttcgggttgtaaagtactttcagcggggaggaaggtgttgtggttaataaccgcagcaattgacgttacccgcagaagaagcaccggctaactccgtgccagcagccgcggtaatacggagggtgcaagcgttaatcggaattactgggcgtaaagcgcacgcaggcggtctgtcaagtcggatgtgaaatccccgggctcaacctgggaactgcattcgaaactggcaggcttgagtcttgtagaggggggtagaattccaggtgtagcggtgaaatgcgtagagatctggaggaataccggtggcgaaggcggccccctggacaaagactgacgctcaggtgcgaaagcgtggggagcaaacaggattagataccctggtagtccacgccgtaaacgatgtctacttggaggttgtgcccttgaggcgtggcttccggagctaacgcgttaagtagaccgcctggggagtacggccgcaaggttaaaactcaaatgaattgacgggggcccgcacaagcggtggagcatgtggtttaattcgatgcaacgcgaagaaccttacctggtcttgacatccacagaactttccagagatggattggtgccttcgggaactgtgagacaggtgctgcatggctgtcgtcagctcgtgttgtgaaatgttgggttaagtcccgcaacgagcgcaacccttatcctttgttgccagcgattaggtcgggaactcaaaggagactgccagtgataaactggaggaaggtggggatgacgtcaagtcatcatggcccttacgaccagggctacacacgtgctacaatggcgcatacaaagagaagcgacctcgcgagagcaagcggacctcataaagtgcgtcgtagtccggattggagtctgcaactcgactccatgaagtcggaatcgctagtaatcgtggatcagaatgccacggtgaatacgttcccgggccttgtacacaccgcccgtcacaccatgggagtgggttgcaaaagaagtaggtagcttaaccttcgggagggcgcttaccactttgtgattcatgactggggtgaagtcgtaacaaggtaaccgtaggggaaacctgcggttggatcacctccttaccttaaagaagcgtactttgaagtgctcacacagattgtctgatgaaaagtgaatagcaaggcgtcttgcgattgagacttcagtgtccccttcgtctagaggcccaggacaccgccctttcacggcggtaacaggggttcgaatcccctaggggacgccagcgttcaaactgatgaggtcaaacctccaggggacgccacttgctggtttgtgagtgaaagtcacctgccttaatatctcaaaactgacttacgagtcacgtttgagatatttgctctttaaaaatctggatcaagctgaaaattgaaacacagaacaacgaaagttgttcgtgagtctctcaaattttcgcaacacgatgatgaatcgtaagaaacatcttcgggttgtgaggttaagcgactaagcgtacacggtggatgccctggcagtcagaggcgatgaagggcgtgctaatctgcgataagcgccggtaaggtgatatgaaccgttataaccggcgatacccgaatggggaaacccagtgtgattcgtcacactatcattaactgaatccataggttaatgaggcgaaccgggggaactgaaacatctaagtaccccgaggaaaagaaatcaaccgagattcccccagtagcggcgagcgaacggggaggagcccagagcctgaatcagcatgtgtgttagtggaagcgtctggaaaggtgcgcgatacagggtgacagccccgtacacaaaagcgcatgtgctgtgagctcgatgagtagggcgggacacgtggtatcctgtctgaatatggggggaccatcctccaaggctaaatactcctgactgaccgatagtgaaccagtaccgtgagggaaaggcgaaaagaaccccggcgaggggagtgaaaaagaacctgaaaccgtgtacgtacaagcagtgggagcacaggtttacctgtgtgactgcgtaccttttgtataatgggtcagcgacttatattctgtagcaaggttaaccgtataggggagccgtagggaaaccgagtcttaaccgggcgttaagttgcagggtatagacccgaaacccggtgatctagccatgggcaggttgaaggttgggtaacactaactggaggaccgaaccgactaatgttgaaaaattagcggatgacctgtggctgggggtgaaaggccaatcaaaccgggagatagctggttctccccgaaagctatttaggtagcgcctcgtgaattcatctccgggggtagagcactgtttcggctagggggccatcccggcttaccaacccgatgcaaactgcgaataccggagaatgttatcacgggagacacacggcgggtgctaacgtccgtcgtgaagagggaaacaacccagaccgccagctaaggtcccaaagtcatggttaagtgggaaacgatgtgggaaggcccagacagccaggatgttggcttagaagcagccatcatttaaagaaagcgtaatagctcactggtcgagtcggcctgcgcggaagatgtaacggggctaaaccatgcaccgaagctgcggcagcgaacgtatcacccaagacaactttacggagttgacgattgacggagcgaagcgacgtcaaagcgttcattaaagtcgagttggcttagggatacgttcgttgggtaggggagcgttctgtaagcctgtgaaggtgtgtcgtgaggcatgctggaggtatcagaagtgcgaatgctgacataagtaacgataaagcgggtgaaaagcccgctcgccggaagaccaagggttcctgtccaacgttaatcggggcagggtgagtcgacccctaaggcgaggccgaaaggcgtagtcgatgggaaacgggttaatattcccgtacttggtgttactgcgaaggggggacggagaaggctatgttggccgggcgacggttgtcccggtttaagcgtgtaggtgtgtgttccaggtaaatccggttcactttaacactgaggcgtgacgacgaggcactacggtgctgaagcaacaaatgccctgcttccaggaaaagcctctaagcatcaggtaacacgaaatcgtaccccaaaccgacacaggtggtcaggtagagaataccaaggcgcttgagagaactcgggtgaaggaactaggcaaaatggtgccgtaacttcgggagaaggcacgctgacacgtaggtgaagtgatttactcatggagctgaagtcagtcgaagataccagctggctgcaactgtttattaaaaacacagcactgtgcaaacacgaaagtggacgtatacggtgtgacgcctgcccggtgccggaaggttaattgatggggtcagcgcaagcgaagctcctgatcgaagccccggtaaacggcggccgtaactataacggtcctaaggtagcgaaattccttgtcgggtaagttccgacctgcacgaatggcgtaatgatggccaggctgtctccacccgagactcagtgaaattgaactcgctgtgaagatgcagtgtacccgcggcaagacggaaagaccccgtgaacctttactatagcttgacactgaacattgagccttgatgtgtaggataggtgggaggctttgaagtgtggacgccagtctgcatggagccgaccttgaaataccaccctttaatgtttgatgttctaacgtggacccgtaatccgggttgcggacagtgtctggtgggtagtttgactggggcggtctcctcctaaagagtaacggaggagcacgaaggttggctaatcctggtcggacatcaggaggttagtgcaatggcataagccagcttgactgcgagcgtgacggcgcgagcaggtgcgaaagcaggtcatagtgatccggtggttctgaatggaagggccatcgctcaacggataaaaggtactccggggataacaggctgataccgcccaagagttcatatcgacggcggtgtttggcacctcgatgtcggctcatcacatcctggggctgaagtaggtcccaagggtatggctgttcgccatttaaagtggtacgcgagctgggtttagaacgtcgtgagacagttcggtccctatctgccgtgggcgctggagaactgaggggggctgctcctagtacgagaggaccggagtggacgcatcactggtgttcgggttgtcatgccaatggcactgcccggtagctaaatgcggaagagataagtgctgaaagcatctaagcacgaaacttgccccgagatgagttctccctgagacttagagtctcctgaaggaacgttgaagacgacgacgttgataggccgggtgtgtaagcgcagcgatgcgttgagctaaccggtactaatgaaccgtgaggcttaaccttacaacgccgaagatgttttggcggttaagagaagattttcagcactgattccggattttcgggaacgaaagattttacgctgaggcaaggcggcaaatgaaggaaaggaaggagcatacagaagtatgtgactgactttgcgaatgcagccaacgcagcatcggtgtaaaagattcgtttctggcaacagaatttgcctggcggccgtagcgcggtggtcccacctgaccccatgccgaactcagaagtgaaacgccgtagcgccgatggtagtgtggggtctccccatgcgagagtagggaactgccaggcatcaaattaagcaaaaggctcagtcgaaagactgggccttttgttttatctgtggtctgtcggtgagcactctcctgaggaggagaaatccgccgggagcggatttgaacgttgcgcagcaacggcccggagggtggcgggcaggacgcccgccataaactgccaggcatcaaacaagtgaagaagcccgtccgtcaggacgggcttttttgcgtgtgcggtaactgtaaaaatgtaggcctgataagcgcagcgccatcaggcaacctgcaccgccggatggccgcttcgccttatccggcctacatgcacttatcagacagcgccgctactcacggataaattaaattcaataatggatacggtttcccaagatcgtcgacctccgaacgtcccgtcaccttgaatcccattttcttataaaatccaacagcttgtgtattttgctcgttaacattggttgtcaatcccggcgccagtgttaacgcatgttcaaccagcatcttaccgataccctgaccgcgcacgtccggatctataaacagagcatccatatgctcaccggtaagcagcataaaccctaccggctcatcctgatcggtcacggcaacccatagtggcgcttctggcagaaaatcgctcaccagttcttccagttcggcccgataagcgtttgacagaaaatcgtgcgtggcatcgactgagcgacgccagatcgcaatcagtttttccccttcctcatgccttgaacggcgaatgttaatcatcatcttcactccttttttgcttacttctattctaatgcaaatgctgtcgtgaaactttctcaccttgaacttgcagactcgacattcgcctgatttctgagtatcttcagctatctggatgtctaaacgtttaaacgtatgtcgtgaggttatcaggttatgccgattcgcgtgctggacgagctacccgccgtcaattttttacgtgaggagaatgtcttcgtcatgacgacttctcgcgcatcaggtcaggaaattcgcccgctaaaggtacttatccttaacctgatgccgaagaagattgaaacggaaaatcagtttctgcgtttgctatcgaactcgccattgcaggtcgatattcaactactgcggatagatgcccgcgagtcgaggaacacgccagccgagcatctgaacaacttttactgtaacttcgacgatatctgcgatcagaactttgatgggcttatcgtgaccggagcgccgctgggtctggtggagtttaatgacgtggcttactggccgcagattaggcaggtgctggaatgggcgaaagatcacgttacttcgacgctatttgtctgttgggccgttcaggccgcactcaatattctgtatggtatccctaagcagacccgtacagataaactttccggcgtctatgaacatcacatccttcatccacatgctctgttaacgcgtggttttgatgattcgtttctggcgccacactcacgctatgccgatttcccggcggcgctgatacgggattatacggatcttgaaattctggccgaaacagaagaaggggatgcgtacctgtttgccagcaaagataaacgtattgcgtttgtcaccggtcatcctgaatatgacgctcatacgttagcgggtgaatattttcgtgacgttgaggccgggttaaatccggaggttccgtacaactatttcccaaaaaacgatccgcaaaacataccgcgcgcaacctggcgcagccacggtaatttactgtttactaactggctcaactattatgtctaccagattacgccatatgatctgcgtcacatgaatccaaccctggattaatcttctgcttctgacgatcctaaagcgtttcagcatgttgaatcaggcaccttcgggtgccttttttatttccgaaacgcacctcatcatgtaattaaatttaatttatattgttatcaataggttaatgcataattaaattaaaaatggaaattgtttttgattttgaaatttaattgagtagtcttagttgtgttgaacgaaaagtgcacagtgatccttcgttcgcattggggatgtatctggatcaacaacgaggagctgcatgatgaatccacaggcaaccacaactgatgaattaacctttaccaggccgcaaggcgagctggaaaagcaagtcctgaccgctgaagcagtcgagtttttgacggagttagtcacccgttttacgccaaaacgcaataaactcctggctgcccgtatccagcaacagcaggatattgataacggtaagttgcctgattttatttcggaaaccacttccattagagaaagtaattggcagattcgtggtattccggcggatttacaggatcgccgagtagaaattaccgggccggttgaacgtaaaatggtgattaatgccctgaacgcaaatgtgaaagtgtttatggcggattttgaagactcgctggcgccggactggaataaagttattgatggtcaaatcaacctgcgtgatgcggtgaacggcaccattagctataccaacgaagccggaaaaatctatcagctcaagcccgatccggccgtattgatttgtcgtgtacgtggtctacatctgccagaaaaacatgttacctggcggggggaagccattcccggcagcctgtttgattttgctctgtactttttccacaactataaagcgctgctcgctaaaggtagcggcccgtatttttacctgccgaaaacgcaagcctggcaggaggcagcctggtggagcgaagtgttcagctacgccgaagaccgctttaacctgccgcgcggtacgatcaaagcgaccctgttgattgaaacgctgccggctgttttccagatggatgagattcttcatgcgctgcgtgatcatatcgtcggtctcaactgtggtcgctgggattatattttcagctatatcaaaacgttgaaaaatcacccggatcgcgttttgccggacaggcaggtggtaacgatggacaaaccgtttctgagcgcctactcgcgcctgctgatcaaaacctgccacaagcgcggcgcgttcgcgatgggcggtatggcggcgtttatcccgagcaaagacgttgaacgcaacaatcaggtccttgccaaagtgaaagcggataaagcgctggaagcgaacaacggccacgacggcacgtggattgcgcatcctgggttggcggataccgcaatggccgtctttaacgaggtactgggcgagcacaaaaatcagctgttcattacccgtgatgaagatgcgccgattaccgctgaacagttactggagccatgtgaaggcgaacgcacagaagcgggaatgcgcgccaatattcgcgtggcagtgcagtacattgaagcgtggatctccggcaatggctgtgtaccgatttacggtctgatggaggatgccgcgacggcggaaatctcacgaacctctatctggcagtggattcaccatgagaaaacactgagcaatggaaaacccgtaacgaaaacgcttttccgcgaaatgttggcggaagagatgcgggtaatccaggacgaactgggcgagcaccgctacagcagcgggcgcttcgacgatgccgcacgtctgatggagcaaatcaccacctcagatgacttaatcgacttcctcaccctgccgggctatcgcttactggcttaattcaccacataacaatatggagcatctgcacatgaaaacccgtactcaacaaatcgaagaattacagaaagagtggacacaaccgcgctgggaaggcatcacccgcccgtacagcgcggaggaggtggtgaaattacgcggctcggttaacccggaatgcacgctggcgcagctcggcgccgcgaaaatgtggcggctgttgcacggtgaagcgaaaaaaggctatatcaacagccttggcgcgctgaccggcggtcaggcgttgcagcaggcgaaagccggtattgaggcgatttatctttcaggctggcaggtggcggcagatgccaacctggcatccagcatgtatccggatcaatcgttgtacccggcaaactctgttccggcggtagtggatcggatcaacaacacttttcgtcgtgcagatcagatccagtgggcatccggtattgaacccaacgatccgcgctatgtggattacttcctgccgatcgttgctgatgcggaagccggttttggcggcgttctgaatgccttcgaactgatgaaatcgatgattgaagccggtgcagcggccgttcacttcgaagatcagctggcgtcggtgaagaaatgcggccatatgggcggcaaggtgctggtccccacgcaggaggcgattcagaaactggttgctgcgcgtctggccgctgatgtgatgggcgtcccgacgctggtgattgcgcgtaccgatgcggatgcggcagatctgatcacctccgactgcgatccctatgacagcggttttattaccggcgaacgcaccagcgaaggtttctaccgcacccatgcgggcattgagcaggcgatcagccgcggtctggcgtatgccccgtatgccgatctggtatggtgcgaaacctctacgccggatctcgaactggcgcgtcgttttgccgatgctatccacgcgaagtatccgggcaaactgctggcctataactgttcaccatccttcaactggcagaagaatctggacgacaagaccattgccagcttccagcagcagttgtcggacatgggttacaaataccagtttattaccctggcgggcatccacagcatgtggttcaacatgttcgacctggcgcatgcatacgcgcagggcgagggcatgaagcactatgttgagaaggttcaacaacccgagttcgccgcggcgaaagatggctacacctttgtttcccaccagcaggaagtgggtactggttacttcgacaaagtcaccaccattattcagggcggcgcgtcatccgttaccgcgttaacgggttccaccgaagaagcgcagttttgattgatgcccggtggcgctgcgcttaccgggcctacagatagcgtaggccggataagcgaacgcgccatccggcatgacgtggtgccggatgagggaaaaaaatgccgcgtggcctggaattactgattgctcaaaccatcctgcaaggctttgacgcgcagtatggtcgatttctggaagtgacttccggcgcgcagcagcgttttgaacaggccgactggcacgccgtccaacaggcgatgaaaagccgtatccacctctatgatcatcatgtgggtctggtggtggagcaactgcgctgtattaccgatggcaaaagtaccgacgcggatttccttttacgcgttaaagagcattacacccggctgttgccggattacccgcgcttcgagattgcggagagctttttcaactccgtttattgccggttatttgaccaccgctcgttaacacccgagcggttgtttattttcagttcgcaaccggagcgccgcttccgtactatcccgcgcccgctggccaaagacttctttcccgatcacggttgggagccgctgttgatgcgcatactcagtgacttaccgctgcgtctgccctggcagaataaaagccgggatatccgctatattatcgcgcacctgactgaaacactgggcgaggacgcgctacctcgctgccatgtccaggtggcgaacgagttgttttaccgtaataaagcggcctggctggtaggtaaattaaccacacctgacggtacgctgccgtttttattgccgattcatcgcactgatgagggggaactgtttgtcgatacctgcctgaccaccacggcagaagcgagcattgtgtttggttttgcccgctcttattttatggtgtatgcgccgctgcctgccgcgctggttgagtggttgcgtgaaatcctgccgggtaaaaccactgccgaactgtatatggcgattggctgccagaaacatgcgaaaaccgaaagctaccgcgaatatttatgttatctggctgaaagcgatgagaaatttattgaggcgcctggcatccgcggcatggtgatgctggtgtttaccctgccaggtttcgaccgggtatttaaaatcattaaagacaaattcgccccgcagaaagagatgtctgccgcccatgtgcgtgcctgttatcaactggtaaaagagcatgatcgcgtcggtcgtatggcggatacccaggagtttgagaatttcgtgctggataaacggcaaattgatccggcgctgatggcgctgttacgacaagaagcgccagagaagattaccgatcttggggaacatatcgtcattcgccatctctatattgaacgtcgcatggtgccgctcaatatctggctggaacaggtagaaggccagcagttgcgcgatgcgatagaagaatatggtaatgcgattcgccagcttgccgccgctaatattttccccggcgatatgttgtttaaaaactttggcgttacccgtcatggtcgcgtggtgttctacgactacgatgaaatttgctacatgacggaagtgaatttccgcgatattccgccagcgcgttatccggaagacgaactggccagcgaaccctggtatagcgtctcgccaggtgatgttttcccggaggagtttcgccactggctgtgtgccgatccgcgtatcgggccattgtttgaagagatgcatgccgacctgtttcgcgccgattactggcgcgcgctacagacgcgtattaaagaagggcatgtagaagatgtgtatgcctatcgacgtagacagcgctttagcgtgcgttacggcgcgatctcaagtacggcgaactcttcgtaaaccagttccatctccggcgaccaattaccctcgcgctcaaaaaaggcccggtgtgccgcttgccagtacgccaggctaagatcgccttcgccttccagtgcggcgagatcggcgctcatctcgttaaaacggatcagcctgagcgccagcgtgcgtatgacgcacacggcgtcgcctgtgccgttgagcacaatgtgatatgacccgggcgtgacagggggttgctctttctgatagctaaccagcgagctacaggtgccacgctttttaccggcgaccactagcgccgccagctcgtcggccagcgccggcgaatcaccgaaagaccaacagaaggcctgtgggtacttctcctgccagtataatttcaggctgctcatttcagcgagttccaccataggccagcgttacctctttcgccgctttaatcaccatggcgccaagttcggtgacgcgatcgtcggtaatgcgtgagcaggggccggaaatagagagggccgcaaacggttcgcggtgttcgtcataaatacacgaggccacgcagcgcagaccgagcgcatgttcttcgtcgtcaaaggaatagccgcgcttgcgtgtttgggcgaggtcatctttcagatgcagcggcgacaccagcgtcgcatgggtataagcgtgcaaccccttgcggtgcagcagactggtaacctgttcctcactgagctgtgataaaaacgccttgcccgcgccagaggcgtgcatgggcagcttgccgccaataggggcggacatgcgcatcaattgtgtgcactgcacctggtcgataataatagcctgatggtcgctctggtcgagtacggcaaggtttaccgtttcgccggagtcctccatcagcttgcgcaaaatcggatggacaatcgccagcagattacggctctgtaagaagctgctaccgacgataaacgcgtgtgcgcctacggcccaatggcccagctcaccaacctggcggacaaaaccctgctgctgcatggtggtgagtagacggtgagtcgtggaattaggcaaacccgcctgttgcgccagttcggtcagcgcgacgctgccgttggactcggcaatccactccagcagcttcagaccgcgagttaatgactgaacctgcccggttacgggtgcagtggtagcggcaggttttctcccgcgtttcgcgggaacaggggcaaccatggcagactcctttttctgtatcgtggaaatcattttcgttttattcaattataatgcaagagttcctgaactgatcggatgagtgacatcacaggatgcccgatagcgctgcgcttatcaggcctacgctttgggagccgccaaagtaatttgtagactgataaggcgcttgcgccgccatccggcaaagcgacagaagtgggtggcaagctgaacatgtctcatgttgcccgttgttctcttttccgccagcacgctttgtgccagtatggctcgttacgtggagcgttgtcgggagcgagtgtgagcagcaaagttgaacaactgcgtgcgcagttaaatgaacgtattctggtgctggacggcggtatgggcactatgatccagagctatcgtctacatgaagaagatttccgcggggagcgctttgccgactggccctgcgacctgaaaggcaacaatgacctgctggtcctcagcaagccggaggtgatcgccgctatccacaacgcctactttgaggctggcgcggatatcatcgaaaccaacacctttaactcgacaaccattgcgatggcggattaccggatggaatccctgtcggcggaaattaactatgcggcggccaaactggcgcgcgcctgcgccgatgaatggacggcgcgaacaccagaaaaaccacgctttgttgcgggcgtgcttggtccaactaaccgcacggcctccatttcgccggacgtcaacgacccggcgtttcgtaatatcaccttcgatcagctggtggcggcctaccgtgaatccaccaaagcgctggtggaaggtggcgcagatctgattctgattgagaccgtttttgacaccctgaatgcgaaagcggcggtgtttgcggtgaaagaagagtttgaagcgctgggcgttgacctgccgatcatgatttccggcaccatcaccgacgcctctggccgtacgctttccggccagactaccgaagccttttataactcgctgcgccacgccgaggcgctcacttttggccttaactgcgcactggggccagatgaactgcgccagtacgtccaggaactgtcgcggattgccgaatgctacgtcaccgcgcacccgaacgccggcctgccgaacgctttcggcgagtatgacctcgacgccgacaccatggcgaaacagattcgcgaatgggcggaagcgggcttcctgaatatcgttggcggctgctgcggcaccacgccggagcatattgcggcgatgagccgcgccgttgccggtttgctgccgcgccagctgccggatatcccggtcgcctgccgcctttccggcctggagccgctgaacattggcgacgatagcctgtttgtgaacgtcggcgaacgtactaacgtcaccggctcggccaaatttaaacggctgatcaaagaagagaaatacagcgaagcgctggatgtcgcccgtcagcaggtagaaagcggcgcgcagattattgatatcaatatggatgaggggatgctcgacgccgaagcggcgatggtgcgtttcctcagcctgattgccggtgagccggacattgcccgtgtaccaatcatgatcgactcctccaaatgggaggttatcgaaaaagggctgaagtgcattcagggtaaaggcatcgtcaactctatttcgatgaaagagggcgtggaagcctttattcatcatgcgaagcttctgcgtcgctacggcgcggcagtggtggtgatggcctttgatgagcaggggcaggccgatacccgcgcgcgtaaaatcgaaatttgccgccgagcctacaaaattctcaccgaagaggtgggtttcccgccggaagacatcatcttcgacccgaatatcttcgccgtggcgaccggtattgaagagcacaacaactacgcgcaggactttatcggcgcttgcgaagacatcaaacgcgagctgccgcacgcgctgatctccggcggcgtgtctaacgtgtccttctcgttccgcggcaacgacccggtacgtgaggctatccacgcggtattcctctactacgccatccgcaacggtatggacatgggcatcgtcaacgccggacagctggctatctacgacgacctgcccgccgagctgcgcgatgcggttgaagatgtcattcttaaccgtcgcgatgacggcactgagcgtttgctggatttggcggagaaataccgcggcagcaaaaccgacgaagctgccaacgcccagcaggcggaatggcgtagctgggacgtgaaaaagcgtctcgaatactcgctggtgaaaggcattaccgaatttatcgaacaggataccgaagaagcccgtcagcaggccgcccgcccgattgaggtgattgaagggccgttgatggacggcatgaacgtggtcggcgacctgttcggcgaagggaaaatgttcctgccgcaggtggtgaaatccgctcgcgtgatgaaacaagcggtggcctacctggagccgtttattgaagccagcaaagaaaaaggctccagcaacggcaagatggtgatcgccaccgtgaagggcgatgtgcacgatattggtaaaaatatcgttggcgtggtgctgcaatgtaacaactacgaaatcgtcgatcttggcgtgatggtgccagcggagaaaatcctcagaacggcgcgtgaagtgaatgccgatctgatcggtctttccgggctgattaccccgtcgctggacgaaatggtcaacgtggcgaaagagatggagcgtcagggctttactatcccgctactgatcggcggcgcaaccacttcgaaagcgcatacggcggtgaaaatcgagcagaactacagcggtccgacggtctacgtgcagaatgcttcgcgtaccgtgggcgtggtggcggcgctactctccgacacccagcgtgatgactttgtcgcccgtacccgcaaagagtacgaaaccgtgcgtattcagcacgcccgcaaaaaaccgcgcacgccgccggtcacgctggaggcggcgcgcgataacgatctggcattcgattgggaacgctacaccccgccggtagcccaccgtctgggcgtgcaggaggtggaagccagcatcgaaactctgcgcaactatatcgactggacgccgttctttatgacctggtcgctggccggcaaatacccgcgcattctggaagatgaggtggtgggcgttgaggcgcagcgtctgtttaaagacgccaatgatatgctggataaactgagcgccgagaaactgttgaatccgcgtggcgtggtgggcctgttcccggcgaaccgtgtgggtgacgacatcgaaatctatcgcgacgaaacccgtactcatgttctgacggtcagccaccacctgcgccagcagaccgagaaagtcggttttgccaactactgtctggcggattttgtcgcgccgaaactgagcggcaaagcggattacatcggtgctttcgcggtgaccggcggtctggaggaggatgcgctggcggacgccttcgaagcgcaacacgacgactataacaagatcatggtgaaagcgattgccgaccgtctggcggaagcgttcgcggaatatctgcatgagcgtgtacgtaaggtttactggggatatgcgccgaacgagagcctgagtaacgacgaattaatccgcgaaaactaccaggggattcgcccggcgccgggttatcctgcctgcccggaacataccgaaaaaggcactatctggcagctactggatgtcgaaaaacacaccgggatgaagctcaccgaatctttcgccatgtggccaggcgcgtcggtctccggctggtacttcagccatcctgagagcaaatacttcgcggtagcgcagatccaacgcgatcaggtgacagattatgctttccgtaaaggaatgagcgttgaggatgttgagcggtggctcgcgccgaacctgggttacgatgcggactgattcataaaatcgtcacttttccttacaacatacaaggcactcattgggtgccttgtctctttcttacaattaaacccttatactgaaggaaggctctacgctgaatttgccggatggcggcgtaaacgccttatccagcataccgtattacgtatggtaagcccggtggcgtgcaacgccagcaggccttaacgctttgcgccatcaggcaatttatcgcaagtgagcttcaggaaaacgtataacgataaggagaacctgacgccgtgttaactttgctccatctactttctgccgttgcgctgttggtatggggaacacatatcgttcgtactggcgtaatgcgcgtgtttggcgcgcgtctacgcactgtcctcagccgcagcgtggaaaagaaaccgctcgccttttgtgcgggtatcggtgttaccgcgctggtacaaagcagtaacgccaccactttattggtaacgtcgtttgtcgcccaggatcttgtcgccctgacgccagctctggtgattgtgctgggcgctgatgtgggtactgcgctaatggcgcgtattctcacctttgatttgtcgtggctgtcgccgctgctgatttttattggcgtgattttctttttgggacgtaagcagtcccgtgccgggcagcttggtcgcgtcggtatcgggcttggcctgattctactggcgctggagctgattgtgcaggcggtgacgccgatcactcaggctaatggcgtgcaggtcattttcgcgtcgctgacgggcgacattatgctggatgcgctgattggcgcgatgttcgctattatcagttattccagcctggcggcggtgttgctgacggcgaccctgacggcggcggggattatatcgttcccggtggcgttgtgcctggtcatcggcgccaatctgggatcggggctgctggcgatgctcaataacagcgccgccaatgctgccgcgcgtcgcgtagcgctcggcagcctattgttcaaattgatcggcagcctggtcatcctgccgtttgtccatccgctggcgaatctgatggatgagctatcgctaccgaaatcagagctggtgatctatttccacgttttctataacctggtgcgctgcctggcgatggtgccatttgccgagctgatggcgcgtttttgtaaacgaattattcgtgatgagcctgaactggatacccatctgaagccgaaacatctggatgtcagcgcgctggatacgccaacgctggcgctggccaatgctgcccgcgaggtgttgcgcattggcgatgcgatggaacagatgatggaagggctaaaaaaggtcatgcacggcgagccgcgtgaagagaaagcgctgcgcaagctggcggatgacgttaacgtgctctacaccgcgattaagctttatctggcgcgaatgccaaaagacgagctggcggcggaggagtcccgccggtgggcggagattattgagatggccctgaacctcgaacaggcgtcggatattatcgagcgaatgggcagtgagattgccgacaagtcgctggcggcgcgtcgggcattttcagaagaaggattgaaagagctggatgcgctttacgatcaactgctcagtaatctgcaactggcgatgtcggtctttttctccggcgatgtcaccagcgcccgtcggttgcgccgcagtaaacatcgcttccgtatacttaatcgccgatactcacatgcgcatgtcgaccgcctgcaccagcagaacgtgcaaagcattgaaaccagctcgctccatttagggctgctgggcgatatgaagcgtcttaactcactgttctgttcggtcgcctatagcgtactggaacagccggatcaggacgaggaacggggcgagtattaagtgaaatgccggatggcggggcctacggagaacatgcgcgtaggcccgtcattcggcattcaatatggcctgggattaaaagcgatgacccgcttccagcgccacggcctcttcgcccgctttaaacacccaggtggtattcgggccgccgagaaccgcctggccgttgctcacctgaatccagttaccttccggcaaaccaatcactgtcagttccggcgcgaccaccagcagttcgcgaatacgctgctcgcgggtctcgcccttatgaccttccggcaaggcgttagtgaagtgaggattaatttgcagcgggaacagatccagcgcgtcgaaaccgtttggatcgacgatcggcatatcgttggtcgtgcggatagtcgggcaggcaaggttggcgcccgcgctccagccgatatacagcgcgccgcgttttaccctgtccgccatcggcgccagcagcccgcgttcacgcgattctttcagtagctggaaggtatttccgccgccgacaataatgatttccgctttctcaatcgccgcaagcggatcggcgacacgatgaatccctgtgacgtttacccctaatggcgcaagcacctctgcggttttatccgtgtactcgtcccatgtttgcgtgacgccggcaaacggaataaacacggctgagcgtcgaccgttcaattgattcgctatcagcggcagagcgtgttccagccaggccttacccggcagcgtcgagttacttaataaaagcagttccattacttctccacctcatcaggaaatgtcaaaacgtaataatgctaccattatccatttaatgtcttactgatatggctcatgatgttacgcgtgtcacaggcaaagcgcggtcgctaaaagtgacgacaggccagatctgccatctggtatcgcctgaaaaattacaggtataatccgcaaaattatttaacacgtttagagacgaaaatggcaaaactgaccttacaagagcaactgctacaagcgggattagtgaccagcaaaaaaatggccaaagtccagcgcacggctaaaaaatcacgcgttcaggctcgtgaggccagagaggcggtggaagaaaataaaaaggcgcaacttgagcgtgataaacaactcagtgaacagcaaaaacaagcggttttagcgaaagagtttaaagctcaggttaagcaacttattgaaatgaatagaatcaatgtatctaaaggcgatattggttttaacttcaccgataataacgtcatcaaaaaaatagacgtggataagctcactcagacgcaactgattaatgggcgtctcgcgattgcgcgtctggttatcaataacagcggtgaatgtgaatatgcgattattcccgcgagcgtcgccgataaaatcgcacaacgagatgcggacagtattgtcgtaaacagtgcgctgagtcaggaagagcaggacgaagatgatccgtatgccgattttaaagttcccgacgatttgatgtggtaagtcacattcccgacgtttatgtagaaaaatttctcagagagtaaatatgctgaccgacacatctacccggcttaataaatatatcagtgaaagcggcatctgttcgcgtcgcgaggcggaccgttttatcgaacagggcaatgtctttatcaacggcaaacgcgccgccattggcgatcaggtagtcgcaggggatattgttaaagtaaatggtcggttgattgagccgcgagaagcggatgatttagtgctgattgcgctgaataaaccggttggcattgtcagtaccactgaagacggcgaacgcgacaatattgtcgattttgtgaaccacagcaaacgtatcttcccgattggtcgtctggataaagactcgcaggggctgatatttctgactaaccacggcgatctggtcaataagattctgcgtgccggtaacgatcacgaaaaagagtatctggtgacggtggataaaccgattaccgacgagtttattcgtggtatgggcgctggcgtgccgattctgggtaccgtcaccaaaaaatgtaaggtgaaaaaagaggcgccgtttgtctttcgcattaccctggtgcagggattaaaccgtcagatccgtcgtatgtgtgaatactttggttatgaagtgacgaaactggagcgtacgcgcattatgaacgtcagcctgagcgggattccgctgggcgagtggcgcgatctgacggacgatgagctgatcgatctgtttaaattgattgagcgttcctcttccgaagccaaaccaaaggccaaagcgaagccgaagaccacgggtattaagcgaccggtcgtggcgatcgaaaaaagcaatgagaaagcgcgcccgacatcaagcggtaagcgctttacctcgccgggacgaaagaagaaaggacgttaacgtctgccgcgcgtcggcgtattcgccgaccaggagaatgacgcttccgtatcgggtttatacgcctgcttcttcttcaactggcgggcttttttcgcttcagcctcacgcagcgccatcagcttatcgatgtactccttttttacgctgttggtctcagaattggtcagcggacgaccgtgtgcaatacgggcgcggtccagcaacgttttcagttcgcgctgttcgcgctcggtcatctctttttgggtaatgcgggggagtgccatacgggtgccctcagttagccgatgcatttagtctacggcaatacgcaacgggcggatagcgtgtaagccgggtaagcttgcgccacccggcaatattttaatttacctttgccgtttcgcccgatttttcaacaatcggtttcccggaccagtaaccagccagtagtgaccctgaaaggttgtgccacactgagaacagcgcgccaggcagcgctgcgagcgggccaaagtagattttacccaatgcagcagcaagaccagagttctgcatcccgacttcgatcgccagcgttcgacaggttgactcatcaaaaccgaacagacgtccaccccagtagccgccaagcaggccaagggtgttatgcaggatcaccgcgatgatcaccataaagccgacggaggcgatatgtgaagctgaacccgcgaccaccgcgctgatgattgccaaaatgcacaccatcgagaatgctggcagataaggttttaccactttcactacgcgcggaaacagatggtgaatcaccaaccccagcgtgattggaatgaccacaatctgtagaatgctcagcagcatacccatcacgtcgacttgaatatgggcatcgacgtacaggcgcgtgagtagtggtgtggcgaccacgccgaccagcgtggagaccgatgaaatggtgactgagagcgcgacgtctcccttcgccagatagatcattacgttagaggcggtgccgctggctacgctaccgaccagtaccatcccggcggacagatctggcggcatcttaaacagcaacgccagcagccatgccgcgagcggcattaccagatagtgcaggaatatccctgcggcgacaggggctggtcgggagagcacgcgtttaaagtcgtcaacgttaagatggacccccataccgaacataatcaacatcagtagtgtcgcgacccacggcccaacaggagtaaaggtggatggtgtgtaatacgcagtgagagagagcagcagcgcccataacgggaacagccgggtaatgacggcgagcatgttgttttccttgcaagtatgttgtgtttgttatcaacgggtcaggatcgagccagaccatagttattgtttatcgcgtgaaggaagattattcaaacaaattacgctcatgatccagtgtgggcacgtggcaggctggatgacgcgcctgcgtcgccatccggcaacgtatcgcccgatggcgcttacgctaccgtattagaaatatatagaggttctggtggcgtaaagaaaagcgccggcattgaagagaaggaagctttaacgcagtgataacttatattgtttcactttgctttggattgtgttttttaaactaaagtaaggcacccagggcaatgctgtgttccaggggcgaggggaaccatgaaaacagactatgcttgctccgtcaggtaattttccattacctgtcccatcgtatagttcagggttaaaaccaatcatttttggtgttgctatattagctttgtaactaataattcttccgggtaagatgttttgccatctttcagcatcttgacatattctgccgataaatccttgatcgccatgatagggtggggttcttatggcattgatttccttttcaggatttttcataaattcatcccacacatttttttttgcgggtgcaggaataaacataatacctgttgctggcgcaactgaagcaccatgctgagaaaagtcattaagtaatgttatttttttcatagttgtcagaggagtaatatctcccacaataacgctatctatatcaatatagagaatatcctcattaccaagaacaggatgcagtggattgaaaagttctagttttgcccaccatcctggccaatcatacaaaagaggcgctgtatttaccccttttatctttagcgcatctgttaaacaaacagaatcataacctttgagctgcttatgtaaccattgagcatgttttgtggtgaagtctttgctttgtctgagcacagaaacaataatcattatattccccggtgaatattaggtgattttagccatgttccactatatttaatgtgctttatattgcaacaaaattagtgttcatatggttatcgaagttttattacattcaagatgtgaatgtaatttatttgtttataatgttattaatatatgtaatgtaagttgataaatgttttaatgattgttttgtcttttatattttcatggggatatataaaataagagttgggatgggagtgatcttatttcccctttttactgctcccagctctatatcaattccaaatttggaatttagcttgcgattaatccataatccagtttttttctgtttttttgaaccatagatatacatctcatttgccagacgccaccaaaataaaaaaattacgacggcgattgttattggcctgcataagtaatcgatataataaaaattcattactgcgaataatctcatgtcgccagtattcccgtaatccatttccttttttagatatggaaaataataagcaatgtaagagtttgattttttcttcctccaatgaagaaagctatcttgttaaataagtgttattatcgtagggggttcacgtatcaattggtaaaaatactataagatggttttttataatacttcatttgctatgcaaactgaacatttgatgctaacaaataataaagggtattattttaattcaacaccgccgggctttatacccggcgagagattcaacaatcgtattgccagctactgactaaggcataaaggtggctgggggagtagcgccagctatcgtttagtccgagaaattcagcgcaaaactcgctgcaaaacagtctatctttgcgctcccggttatacagcgcgataccgagcgcgccctgccagtcatagcgtttgccgttatgtttgcggaaaaagacttccacttccggcaacgtggcctttaacggtagcttatcccacttatcgtccggtaacggtattatctttccccgcacgccgcgatcgcgaaacgacgcggagtagcagaggtattcattaccgccgtgcgccaccgccagttcacagtgagagtagataccgcgcgtgactttgcgcgtgagccagtcggcaaacctggcgatgccgcgatgctccgatcgccccttatagcaggcgagccagacggtggtttgactcatggttgccagcctgtggagtagtcgtaatccagcaccgcttcgatatcctccagcgcctccaccgccgcaatatgccgctgcgcgttggcaaacaggcgcatatcgtgatccatagtgacggtttcaaactgcgcggcgatgtcgttggtcagttcaatcaaaccgttatttttggcctgccacattaaccctgccggaatctgctgtgcctgacccattctggtgagtgacatttgctgaatacggctgttagcatcgctgtggaaatggttgccgtcgataacgatataatcggcggtaacatcatcacggtgagctttgattgcctgtataacttgtgcttttacactttcaagtgctgagacaaataacgcttcgtcatatacccactcgtttccctgtaatcggtaaaattttccgggtggcggtgtagtaataaattcaagagggttaaggcacacccaacaatttttatctcttagtcgccactgctcatcatctatagaaattactgagtcaggtaacactacgtttaatgaagaagtatcaatccagtctataacctcaaaggttgccggatggtaatatgcatattgagtcatatattcaccatgagatttttacaaaaccgctagaaccgcgtccaccagcgtatcctgataaggctatatttaagctgttaaccgacgctccaccaccacctccagctccgtagccactcgcattgcttccgttagataaaactgcgccagttcctcctttcccaaagaaagtagtttcagcattaccacctgatatagagtccaactggttaaaaccgcttaaaggtattcttgactgaacaatgcctcccgctcctcctgcccccccgttggcgacaacatctataaaaattgagtttccaccgttgatcccagaattcccagcctgtcctacttgcaccacgtttccagtagggttgctattaggtaatacaccaccagccccactagcgcccccagcccccacggttactggataattatttcccgcaataacggggacaatagcaatctctggctctccacttttgccagcattaccacctgaacaatagagaagaccatctgtattactcgtatgccctccacctccaccacctccaccgcctcctaacatttccacaaagacctgagtcaccccatcaggtaccgtaaacgtaccgttagccgtaaaaaactgataatgggaatgattagccggagccgctgcgctcgccttgtcatacgccgcctttaccgcgctcggcgtcgccgcctccgtcgtactggtgctgtcggtggcgttattaagcttcacgatccctttttgcgtcagcgtaccgtccggggcgccggtgatctgcccccaagcgtgtgtatgcctagccggagccgccgcactcgccttatccatcgccgccttgaccgcactgggcgttgccgcttcggtggtgctggtgctatcggtggcgttattaagcttcacaatccctttttgcgccagcgtgccgtccgggacgccggtaacctggttccagacgtgagtatggttcgccggagctgccgcattcgccttatccatcgccgcctttaccgcgctcggcgttgccgcttccgttgtgctggtgctgtccgtcgcactgttaagcttaacaatccccttttgcgtcagcgtaccgtccggaacgccggtaatctggttccaggtatgcgtgtgattacgcgcttccgccatcgccgcttttaccgcctttggcgtagccgctttggtttcgtcatcgctgtcggtggcgttactgagctgcgtaaagcctttctgcgttaatgtcgcatccgggtgatttgtcgaatgttcatgctcgtccagccgggtatccacatagtcgcgcgtcgccagcacgatgctcggatcgaccgtcagcgtcaccgccgtggtgttggagacttccataatcaggcggatacaaacctgcttgccacagccgcccggcagcagcggtttgtacgactcagggaatttgccgatggcgatcagctcgccctcgtcgtcgaacacgcccacttcacgcacataccagccgccaacgtcctccggcagcaccagttcggcaatcagccagttgggattattcggcgcaaccgtcagcgtattcatctcgccgcgccagacttcgtggcgtaatttggtctggctggcgatcggttcataatattgcccaccaccgtcgccaaccgccatcttttgcagatgtagctgttttttatccgcaagggcgctggcgattttcgccattcccctgtcggtcaggagggtataaaactcattatccataattactccgggtaaatagatgtaatttcaaggctccattgccctgtaccgaaatagatcggtttagtttgttgaacttccagaacctggaagggtaagacggtcgttatttctccaccgtaaagcgcgctgccaataacaggaatagcgctttggttaattatccagacaattaacgcttccagttttgaacgcacgttcttatattcatgaataagatcgaccagattattaaacagattttcatccatgccctggttgattagcttaatttcaaccttgaagaaataagccttaccgccatactcaaaccattcggaaatcgtgccgggtaaggataatatttccagtacgcggcgaacggcccagggggttcctttatatttatgcagttcaatcgcctgcttaattaactctcgtttctcctgttcattggcagcaaatagccagccttcgagcccctgtacatgaaactgttcggccaacgagggcaatgccgaggcatcaacgatatccaccagatagaccagcaacgccgtcaggtcgatttgcgcgaaacgttcggcggcaatgttcgccagaattgagaaacgttcgtcgctggccagcggcggcggcagaagcagtttatccatcgctgactccggcaatcgtcacgtcaatagccgtacattccgcccattcgtgcgcctgcaatacctttttcgcgggcatatccagcgcgacgtcgtaaacgccatccacttgtagcactttaattatctggtttggcacaatgtcctggcccagccgggtctggcgcgagcgcgtccatgtattaatcgcttcacgcgcggcggcaagcgtcgtctcctgatcggcggtggtaaacagcgtcagccgggcgctgatctgataagccacgcgcggagaacatttagcgctcaccttatcggttagcgggcgctttttctctttgctcacctcccgttcgatctgggcaagaagctccggccccggcagaccgttcagggtcagcggatagagttccacgcagccttccgccagcccttcatccggccccagtaccgccacgtcgataatcgactggctgaccgagagcgtatggaagcgataggcgccatagctgcccgcgttgctgaaactttccggcgctagctggatgcgtttacgtagcgcgtcgtcgttctcttcgccgcagccgccacttgaggccgtcagattggtgacgctgatatcgtaattgcccacgcggtctaccagcgcgctgatttgcgcaggctgccagttgttgccgggttcaccggtcactacacaggttgcagttaccgcaacgctcaggctgcccgcaggcaacagaacatcttcgtcggtggcgaacatcacgctatccgacgcgctggcgcgggtaccctgtggaatcaccaggttacttttagccgcttgagtaacagaaaactgcagcgtggtttttgccgcctgagcgggcagacggtgaacgccaaccagctcgcctaaataatccagcatcggcgcacgggaatacgcgaccaggttttgcttcgctgcctcctggatggcgatgcggacaaggttttcacgataagcaaacaggtcaatgagcagccgctcagcctgcgccgggtagagttttttaccgctggcttcttcatattgcgcaatcatctcgctggtgatttgcgcggggtcgcggtcaataaagtcgggttcggctatcgccataacacctccgttgagttaattacgccgtctgcggcgcgccattgcacgcgtaacgtcaggtgttcgccgtcaatcgtcggcgtcaccttcagcaaccggcagcgaggttcccacatgcgaatcgcttccaccgattcgcgaacaacgtgcggaatggcccgctcgatcgggtaatcgatgtagcgccacagattgctgccaaaaagcggcctgtggggatcgctgccgcgcggcgtgcgcagaatgatgtgtattgcctgatgaatatcatccagcccgcagacgtattcttcaggacgttgcaaggcaggttgccagtgcagggtcgagggtcgtgttttcgtgttcatgaggctattttcgccttccggcggggggagagatattaaagcgctttaaggaaataattgatggcggggtcagaatgtgttttgcccggtggcgcttctgcgcttaccgggcctgtgttgatgcacattttgttaaatggcgaagatcgcgttttacgtaaagttaaaatgaaattgctgtaatttcacctttgtctacagaagcgtagtaccagaattcatcattgatttctgcgtgcttcattttctcaactggaatcgttttctgccgtccattaaccgagagtgtgatcgaacccgttagctgctcccggctgataatagcgaaatccccgcgggtgttgctataagccgtcgtttcattggaaaggctgtgcttcgctccattagcgattacagaataatcaaaattgactttctttttgaaaatagcttgtacatgataatactcgccgtaaacagcaggatcatggaataaaccaaaatgaccaccgctattttgcaacttgacgaaataatagtcagggatgataaacttctgtttacctgccgctatttctttagtaatgattttttgtcttacgatttcctgtccggccgtttttttataaccgttaagcatcaatgaataggaccaaaggaatacgataccacagagaacagtcacggcagttacgccgacgactccagccttaacgccgcttttcaacagggcgtaagcgatgaaggagatagctaaaaggaaaaacataaacgtaccgttcataacccgatcggggtaggacggcgacgcgaacatgattaaggaagtgccaatacctatacatacgactaacgcagcgcagataagggacgttttatcaattttggcgcgaatctgcttattgaatatgaccagtaagaccagcaataacaaaacaacataagctatccagatcagcgccagatggttatgaacgcgttctgttaagtgaatgaaaatacgttcaaaaatcggccttccataccagaattctttgccgctggcgcggatgaaattgcccggagaaagtatcaatacgcatgaacctgcgattgcacagagactataaactatcttattgcgcgaaacagatttgttttgccataactcgtatgcaatggccagaacagaaataagcgagacgaaaggtgagacgctttcattggaacagcctgccataaagcttagtaatgcaacccacgggctgatcgctttactgttttttattgttatggtgtaaaagaagaacagccatgcaacaacgaacagattcgtccacaaataattcgcagcaccaacgatccagaaagtggtttgacccaaattcgggttcgaaatccagtaagtgaagaatattagtgggaataataagtagtcggatttattccagcgtaatgtacctgagggtgtcttcacaatgaaataacaaaataccagtgtcgaaacggctgcgctgatggaatacacgagttgagaacgtgtatacaggatgagtgcgctggtgtaatcagctataatcctgccactccatgtcatataatgatgaaaatgtgattccggcgaaattcctaaaaggtaatagcggtaatcatcagagtgaataggggtataccattcaataagaaaaatggccaaaaaagccagtagtatcatcgccgttttcggtaatatcttgagcatagtgttcattattccatcattgtttttttgtttttcacgatatagcggggtctttgcttcacctccgtgtaaacgcgtccgatatattcacccatgatgcctatgccgataagctggatgccgcctaagaagagaatcgcggtcataagcgaaggataaccaggaacagggtttccccacatcaatttatcaatgatcatccacatggcatatatcagggagagggcagaaacgctcactcctatatacatccagatacgcaaagggaaagtagaaaaacttgtaatcccctccagcgccaggttccagagtttccagccattaaattttgagttacctgcgacacgttcagcacgggcatattcgaccacatctgtttgacctccaacccatgaaagtatacctttcatgaaaaggttacgttctggtaatagcttgatattttctacaatctcgcgcgacatcaatcgaaaatcaccgacattctcttcaatctttggcgtactgattttgttatgcagcctgtagaaccactcagcgcttttacgcttcaggtggccatccgttgaacgatcgatacgcttagccagcaccatttctgcaccagcctgccatttattgatcaaatgtgggattacttcgatgggatcttgtaaatcaacatcgatagggatcaccacatctccggtcgcgtgatctaatccggcaaaaagtgcaggttctttaccaaaattgcgggtaaatgagatcggaacaacaagaggatcggcaacagctaatgcgctgatgattgattcagtcgcatcgtgactcccatcattaacgaagataatctcaacgttataaggtttaagtgaactgtattctctgaccgttttatagaaaatagggatcgcgtcctcttcattaaagacgggaaccactaatgaaattttcatttctcattcctgaaaacaatgaatctggaatataaaaatccgcaaataaggctaattgcggaaaatacaatgagcgtaaaaatgggaggcatagcacacttgtcgcctgtccatcccacgacggcgctcagcacgcccataaaaccgacgtacagcaaataacgtccggttgatacgctggctccaaaggtaaaccgggcgttagcgaaaaaactaaaactgacagcgacagcaaagcccgctacgtttgccaaagcctgacttgtttgaaatccatagacgcaaagggcaaagatagcccaatgcaaagcagtattaagtacgcctatcgaaacgtactttataaataattttatcattatagcaatcaagaagttgtaattcagcgaagtctaccagacaaaactgagaggatcattcctgaacagcagattttatgtaaacagggcgaagttaaagtaaaaaataacgctagttttccaatatacatatatgcaatatttgcagcgcaaagtgattacattttcatcggaaatagcgcgcgaaaagggactaatcacgttgcgctgaaaataaatatcctccagcaatttgcccggtggcgcttctgcgcttaccgggccggtgtttatgcaccttttgcaggctggataaggcgaagccaccatccagcagcaatttgcaggttagtgagagtggtggttagagttgccgccgttgtccatcagcgtgccgctggcgttaacgttgccgaggacattcacgttgcccgtaatcaccgcgctgtttccgacgccgccgctgcctgccataccgccaagccaggtgagttttttcatcacggtaacgtcgccggtaaaggtgctgagcggcgcatcgacggtgacattcagcgctttaatgcccgtatggggcgcttccacgttgacatctaccgccttgacgcccacggaggtggccgccacgtctacggtttctgatatcaccgtgacgtgctgcgccctgacctctacttgcggtgaagtaagctgcgtatgttccttcacttcaatgacgattttttctatgccgccgttgacggtgagctggtgtaacgcacggtcatattcaaaggccgcgccgtcggaaaactgcacgtagcgcttgtcgcgcgaggccagcggcgcggtatccacgctggagtagaccgcgcccagcaccaccccatcctcgccgttgtcgtcgagcgaaacttccacctgttcgccaatatccggcaaccagtaatctttgttgtcctgcgtgttgcgttgcagcaccgcaagccagttactgcgcaggttatcgcactccggtagagtgactctgacgcgcacgaccgcctcatcaatatcgctgataatacccgtctggcgggtaacgcctttcatattgcctccttactggctggttgccggtccgcgtgaaatgtcgatttcggtagtgtagccgccgctgcgcgtgagtttgtgcatggatttatcaatcagccactgcccggaaagtacgccaaaatcgctcagttctatcttgttgcccgccgtcaactgcgggcagcccatcaagctgagcgtgccggtctgctggtattcgttgtggctgtccagcgcggcattggctttagcctgcgccgcgccggtatccggagcgcgactgttgatcttcagggtatcggcgctggtcgccgcaccgcgcgccgaggtcttttcctggctatcatgggtataaataaccagttctttttgcttgctattttgatgctgcacggtggcgtttttgtagatccggttgatggtatctttgaacgtgtagtgcgaaacatccgtccgcctgagcgtcttcaccggcgccagacagcgcagcgtcggcagatgcgaaaagatcagctccgtcgccgtcactttcacggtatagccatattcactcgccagccgtttgagaaacgctacatcggtttcggcatattgcgtgacccgatcaatcgtcagcggcgcaatcttgcccgccagcgttaaaccgtgtttttgcgcgatgcgactggcgatggcggaaagcgtagtctcctcaaagccctggctgtttttggtgcgtagcgctttgctgaccgaggtggcgataccgtcgatattgaccgtcgaaggcggcgcgctgatatcaattttatcaatgacatagattccgcaatcgagcagatcttcgccctggtagcccaggcgcagcgccagcgtgtcgccttttcccggataccattcgtttacccagcgcccggtgctatcttccagcgcaatggcaatgacatccgactcgtttttaatactgtcgctgtaactgatgctggtgacataaggcgcgatgtcgtaagtgatctctttatgtccgtaccaaagggtaaaaatgggcgtcagggtggcgaacaccccgccggataccgttatctcagccatggcggtagctccggggtcgtttgcgtgacgctgataaccgggatgatcagccgcacgcctgacggtaaaaccggcataatagcgacgtgcggattggccgcgatgatgcgttcgtaggccagcgcatcgccgtaatagcgccaggcgagattatcccagcgttcgccgtcggtggtgacatgttcaaggtagcgcattacagactcctcgtaatatcggcagcggcaagctggctcacgtcaggagcgcttgtttgcagcgtgccgcgcgcctgattgaccagcgtcgcggcgctgtcgtaagtcgcttccgcgacgctgctggtgatagcgtcaaacagcgattcggcgtgttcgataagcgtgccggcatcgcccgcgcattcgcggatccccggcaggctgtcgatcagttcctgcattttcgccgccagcgctttcggcagcccggccagcgtttgcaaatccagcggctgctggaacagcgcgtctatcgaactcatggtttttttcagcgaatcgacgatatcgccgcatttttctttcagcgctttggcttccttcaccagttctttcgcctgggcgatcgtttttttgatgtcatcaatggcgtcggccacctcatccatcatctctttggcttcacgcataccctcttcaacgacgctcagcagttcatcgaaccaggaatcgttaacgtcgggaagctcatccaacatctcgtcaatgttcggttcctgggtggtgatggccggaggcagcagcgggctcttcggatcgccggtgtactcctgtagcgacaaactgccgccctgggcaatgacgttaccgtaaggatcggtgtgttggtgggtagcggtcagatcggtaatcacgaaccagccgcgataatcgccgttgccgaacaccagcgccatcgcctggtgcgcggtcatcgcttcccgcagacggttcagctcggtggtcggctggcaatactgactatgaaagttgaatttcagggtgattttgtccagcttatcgccgataaattgcacgcccggtttcccttcaatacgggcatggctggtgtaatccacgcccatcgtactttcaaattcgtcccagtaagcgacgacgtcaaattctatttcgcctaatacggcatacattatgcgtactcccggcgccgttgctgcgccatgacatcgttaatcattctctccagctcgcgtttgctcagcgacagcacgttgttgatatctttggcggcattcgcgccgcttccctgcacggtaacctgcggggaaaagtgtacctgcacgttgctttgcgcgcgggagggcagcgtataaggtttcccgccggatttgccgggaagcgcggctggcgtcggcggcgtggcggcgcttttcgtcttcacaggctgcggcgaggccatcgttttggccgaggttgtcaccgctttcgctcccgatgccagcggcgcgctggcctgttgcgcgaccattgttccggcaataccggggacggcggcggcgacagacggcatttcagcgctgatgcccagcgcgcttttcgcccagtcggggatcagcgcttttatcttctcaatcgccccgctcaggaaaggaagcgcattcagaatgccgttgatcaggctatcgagaatattgccgccaaattcgctgaaactggcggggagttcaatgccaaaccagtccagtacgccggcgaaggcgcggtaaaacaaccccagcggcgaccagtcgagaatcagacgcgtgacgccggcaatgcctccgtcaaaggcggttttgatgcgctcccagactccggcaaagaaaccggaaatcggttcccagtagcgataaagtaaataggcggcgcctgcgatagcggtgatagtcaggccgacagggttcatcagcagcgcccgacccagccagataaacgtctggccgaccagccgtagcccttttatcaggccgtttcccagcagcatcgtcaggcttttcgcaccgttgccaaacgatttcagaaccgacagcgcgcgactgccgccgcccagcgccagaccggctttgaccttcaggaagatatcgatcaggcgaataaacggtgacgcaatgaggtttgctcccagcctgagaatattcagcgccccgttgaacagccagataacgctaacgactttagcgaccccttgcaccagcgccggattttcccgcagccaggcgctgaactgccgcaccagcggcgtgatgctttgcgccagttcgccaatggcgggcatcagttccaggccgacggtcagccacagatcgttaagtgaaagttgtaacgctttggtctgttctccgggcgatgtcattttcgcggcgaagtcatcatcaataacatgttgccccgccgcctgcattgcggaggcttttagctggcgatattcgtccatattcgccagcatcggggcgagaaaatcccgcgtttgcgcatcgccgaacatcgcgccgaggttaaatttctccaccatggcctgtagcgcgtcgccgcgcgcggaaagatcctcaatcttcatggtttgcctgaaggtgtcgaggatctgcgggttcattttctccagttgcatctgcacgatgtgggtcatcgcttccgtcacgccgatcccattttgctgatgctccagcagcgatccctgaagatccacgccctggcgggcaaaccaactgtccgtctctttcgagaaggcggatttcaggaaatggtcgaaattcgctgccgccgcgcctgcgtcaggggcatttttcatggcgatttgcatcgttgcggtcagttccgcaatgccttctttcccctgagcgccggtttttccggcaaaggcgttaatccactgggtttgctctgcaacggagccgccgccgctttttgccacgctgtacagcatattttgcgcaaaacggaagtcgtcaggggcgatgttcagtttgtcgcgagtggccagagccgcctgcgcccagctttgcgcgctgtcgcgggaggcggtcgcggctttggcgatatcgggcatgtagcggctaagatcctgcaatgcgctgacgccgccttcgatcatcgtggcggcggtgctttgcagatctttttgatcttgattgaaatcaaggctccagtcgcggatattcaggctcagggcgtcccgcgcggtgttatccatgccgcccttcgccgccatatcgaccatgttgccctgaaattcgtaaggcagcttccagtcgggagtctcaacgttcaggagcttgccgagctgtccggcgaacgtttgtgttttttccagcaacccggcgcgctgtttatcgttctcttcccggcgaagggcggagttagcgagctgttgcgtaagccgggtgacttttgtttgctcaaagctgagcgtgtgcagcgtgctggcgttgagtgagccgtaacgggctattgcctgcgtcaacgtctcattacgcgcctgaagctgggtaataatgtcgttggccaaaatagtgtctcgtataagttgcccggtaacaggctgcttgccggaaaaaggacagggaaggagtgaaccgggcttgggtcaggaaacccgcaggcattaagcctgcgagtcgtattcgtgtttaatttgcgcgctggcttcgtccagccagcaggtaaaatcgtcaaccgacagcgcgtcaatttcactgggcggaaagcgaaaccacctcgccagcagcgccattgcctgccacagttgctgtgggttctgtagccatgctaagcatggactgaaatcgtttctgcaatgcctgatagtccagcagatccatttccgccagatcttcggttaccagcccggtcatagccgccatcagcggctcatcccactcttccggtttatcgctggcgcgtcgcgcggcgcgcatatcttttaccttcaggcgacgtaattgcagaacgtcgatacgttccccggcggcggaggtaaacgggaactgcagggtatatttttcgttcatggtatagtccttattcgtcgtgttaaattcggggccgtagccccgaagtaattaaccgccaatattattgcggtaggcatttaattgatccgcgccatttacgcggaaaatattcgccagataatccagttcaagaagcgtttcaccgtcaaccacctgtttaatataagtgcagccgaaggcgctgctgaattccgggttttcattctgtttaaacgttcccagcgggttctttttaaacattacggtcatatgcgtcaccagcgctaactgatccgctttaccctgcgagttataacaatcgatgctggagcggcactgcaatgccaccgcctgccacggatttgccgttttacgcatgacgtcgtggtaaaacgagttccatttaatttcaccttccagtttgtcaaaaccggcaggcagttcaattttaccgaccatccccagcgctttatgctcctgcataatcatgctgatatcaggcagtttaatttcactcgcgcgacctaaaagattattaccatcaagataaatattggcgttggtaatacggttaatttgaatttttccagccattagcgattgctctccagagaaactaaatattcagaggtaatttcggtttcaaacgtcagacgttccagcggcggcggcggggtgaatttgtagctcagcaacagatgcccggctgccagttcagtctgttcgttacgcgccgggtcgtaccagcattcaaagcccaacaacgcgccgtcggcaatcagcttgcggccccaggtgttcaccgattcggttagcgcgtcgatcagcgcctgattaatcggcatatccatgtattgctggctaaaatagcgaatcgattcgttaatcacatcaccagtacggcgcacgttctcaaagttacgcatatgagtaaccgtcggccaggcggcggtacggttgccccacaggcgcaaaccggagccatagctgttgaagatggtggtgatgccgttttcattcagttgattcacttcggtttgcggatcgtcgatcatcgctgacagcgagcgctctacgccggtaatgccctgaatttcctgattggagttgctccaccagaagcctttttccagatccactttggcacgcaggccagcggcgcgagaggagagcggctccaggacttcgctgttcgtcgcgctgtcgtacactttaacgtgcggatagcacagacgcgcgcgatcggaactggtattgaagttaatcgccccctgcggaccgcgccctgccagaacctgctggaaagtcgtgccgatgggcgcatcaatgtaggtaatggctcccagcgcttctgcctgagcgataagcttaacggcgaccgagttttgcgtacaaaagaccggcgcaatcaggatcttcgcgtaaaaaccaaactggttccaggtgtcctgtaacagcttcatgccggtacggtcacccgccgtgtttaccgcgccaacaatatcggcggcagtcactttggtggggtccgcgtaagtataatttacataggcctgaacgccgggtttcagattggtccccatgcaggtgattttaccggtcagcatatcaatggtgtaatcggtgcctttgatataagcgtttccggcgttcgtgctgcggccaatgttcatcgtttgcacggccccgtgcttgagttgaatctgaccgttgtcatcaaccttcacggtttcactgggaatggtacttttgtgtaccgccggattcagcacgttaatcaccacgaccgtccctgcgccgtgatcgtagatcgccttcagcgcctgcgggatggtgaaatttgccagacctgggccaaactgtgccgcgtcgctttcagaaaggcacagcgttggctggttaaccgggccgcatggcgcggtgccgatcagaccaataaccgcagatttaaccgccttaaccggacgtgggccggtttcgatctcaatggtctctacaccgtgcaggtaattagctgccatggacaatttcctcttcattagtttctacttcttgcgtaaccactggcaccaggtgacggcgggcaatcatggtgattacccactcgttatcttccggcagcgagatttcgctattgggccacagtaagacttcctgaccgtcggcgagcgtgacgccgcttgccgggccactgtagatatatttcattgaatttcctcataattaacgattgtcagcaggggggagtccttgctttcctgttccgcgataaacagggtgctggcggtcatatccagggcgtaacggcagaagtttgcggcgtcgccgatatatttttcgctttccagccagagcggacgatcacagtcgggaagttcaatgccccccaacgagcgacgtagacgatccagcgcgtttatcgcgtcacttatttgcggaacaataacggtggcggaaatccggattagttgtttttgtaccgtggcatccgtattttctggttcggcaaaaaccgaaccgcagtagtgaattaataccgttacctgctgtcctgttgggatatatactttcgcatcggttgatgaaatatgtatatccatatcagggtttaattcacgtagtctattcgccacggtatgtataacagataatgtttccatatacggttttccttgatttaccgggagagataatattctctcttcgttatcgttcagacgtattttgatgtatcaggcatcaggcgtcttttaatctcctttagagaaaaaagttaaaacaaataaaaaatccccggcgtataaacgacggggatttgtttaatggttacctcgttgaatcagttctattttgctatatagcgcatccagttttgcttccagaacggcctggccgcgaagataatcctcgcggcggacataatgcagcggtaaatcggcgcgaaattccagaaattctctctccagcctggaccagcccgcttctgattcgcgccgggcagcttccagtgcttcaaaacgttcattcagccgtttttcaatttgcgccagcagcaatttaccggcagcaaacattaatccaacaaacgaaagtaagagggagatgacttcccaaaaatcgatactgagtttcattactccctctgattaatgaatgcagctagcccgcccccattgcaaataacggggagcatgttggtataaaatcgctttggggtagtgacgattctcgcgccagtttgcggcgctgcgcccggcgttaacgcgttctacatgttcaaaccagatggacgcatccaacccctttgcggcggccagctttttatctctgttcacccagccttgcccgccgttataggcgctcagagtgaaagccattcgctggcagctattttttgctaacacgcttttccacaactggcggtcatactgtaccagcgcgcgtatcgcccaggcgggattaaacggcttgttttcgtggagttccgggtacaactggctcacccattttgccgtcgcaggcataaattgcgccataccctgcgcgccagccggagaaagcgcgtcaggcgcccagccggattcctgatgtagttgcccggcaaaatcagcaacgggggcgttaagcccccagatttcgcgcgcggtacgaatcacttcgttgcgccattgcagggaagcgcgcggcggttcggcagcgtcggcagacaagaaagtcatagcgcagaccaggcatacgtattgataacgcatcgttacagccccagcgcgacggcaaggcaaattgccgcaacgatgatcgcgcgacgaatcatcgccgcggcgcagcacagcgattcttcccaggggcaaaaggagtcgggacgtgcccaggggaaaagactacggtcgagccagtaacccagcaccgctgataacgaaaccaggctgagtttatagatgacgaccggaatttgcgctgatgatgtccagccgataagcgcaaacagtacgacagaggcaaccagccagccggaaagtcggggaacaataatttttcgcatactctatctcctgataattgagagagaagtatcgcttttccccatagtggaagaacgaaaagggctttaataaataactttaaaaaatgtttagcgcatggcgtcaaatgccaacaaataaacgaataaataaagctttcggggcagggggtagaggttgcctgcggagagtcagtatgtgtctgtggcaggctacgatggcggtattgctgcgtcataataatctttgattaaaattatcttattgatttttaaagtcagtttaaaaattcacgcgattgtgaggaaagcaatctttttgatcgaacgcagaaaaaaatgcaaaaaattaactgtatatgcatacagtattgtgtaaaatgatgacatcagtgaaggcttacttcacctataaaataaatacatattataaattgaaaacgatatatatatttttttaatttataattaaatgcgttgatagtaaatatttatatatattttgaatgtattgataggtagttattgcaccgttttttacgcttccctttttggtgccgtcacggggagcatggtgctggatatggagataaaatatgattcagaaatcaaaagaaatggttcggcttccggagattattaacgatctggcgtttcatgcgtcgcaggtgcttattgaaagcatgaatattgatagcgcgtcagccgaaaatgccggtcaggcaattgctgacagaatgatgcgcaactggggcgggcaaagcatttattttcccaaaggtatctctggtcgggcttcggaacgggattatcagatttacagcgagtgcgatgggcgtaattatgcggagctggccaaaaagtacaatttgacactgcagtggatctataaaatcgttaagcgggtccacacggaaaaacagcaccagcggcgtatgctgtaagcgatatcgggtatggcgtatagcgcgacaagcgctatacgccgggagcagcgacaggccggataaggcgcctgcgtcgccatccggcagcgtattgcctgatagcgctcacccgctgccgtgtcagggcgattattcaaataagttctgatgtagcttttgcaccactttctcggcatcgtctcccggcacgaggaagcacagattgtggctggaggcgccgtaacaaatcatgcgaatgttgaacggttccaggacgccaaacacttctttaccaacaccgcaggcttttgacaggttgttgccaatcagcgcgaccagcgccagtccttcttcaacttcgacccgacacagcgcggaaagctccatcaataaggattgggtcagtaacgtatcgcccgtggaggtggagccggtagtatccagcgtcagcgcgacgctcacctccgaagtggtaatcagatctaccgaaatattatgccgcgccagaatgccgaacacctctgccaggaaacctcgtgagtgcagcatattcaggctgtgcagcgtcaatagcgtttgattgcggcgcagcgccagcgcgcggaacagcggcgggttttgggttttattgcacaccagcgtaccgcccgcttgcggatctttactggagccaacgaagaccgggatatcgctacgcacggccgggagtaaggtggctggatgcagtacttttgcgccgaaggttgccatctccgccgcttcttcaaagtcgatttcatcaattcgctgcgcgacaggcactacgcgcgggtcggtggtgtaaataccgggcacatctgtccagatatcaacccgcgcggcgtggagcgcttcagccagcaacgctgccgtatagtcgctgccgccgcggcctaacgtcgtggtgcggcctttgctttcactgccgataaagccctgagtaatgaccaacgtttcgctcaggcgcgggagcaactgctgcgcggccagttccgcaagcgctgcgacgtccggttccgcacgaccaaagcgatcgctggtacgcatcactttgcgcacgtcgaaccagtgggcctgtacgtcgcgttcacgcaggatctcaacaaatagcagggtagacatcagctcgccgtggctgaccagttcatcggtcagggctgccgatgtcgccagcgatgccgcctccgccagaatagtgatgttttccagcaggcgttcaatctcttcgcgaatgacattcggatgacgcagacgatcaaggatatcgaactggattttacggatggcgtcgagcgtagcgaaacgttcgccgggctccatcccttcggccagcgccaccagcaggttagtgatgccggcagacgcggaaagcacgactaaacgaacattggtgtcggaaagtacgatatccgcgctacggttcatggcgtcaaaatcagcgacgctggtaccgccaaatttggaaacaacgatctctgtcatatcaacctcgtgtcaggaaatgaaaaacgcgaccatggcacaagggcagaacagaaaccggtgcaggcgcaaatgcaagtaacgtatttataaataaaagttgtggcctggactgtcaacgttgggattatgcggattttttatgctgagtttaggctcagtaacagcgcttataaccccgatacccatttgccgcctttctgcacctcgaattatttagggtatatactttttatcctcattcgacagtgcctggggcaacggcactaaaacaatcacacttttctgtgactggcgttacaatcgatcccagtcacaattctcaaatcagaagagtattgctaatgaaaaacatcaatccaacgcagacttctgcctggcaggcgctccagaaacactacgatgaaatgaaagacgttacgatcgctgagcttttcgcgaacgatagcgaccgtttcgctaaattttccgcgacgtttgacgatctgatgctggtggatttctccaaaaaccgcatcaccgaagagacgctggcaaaattacaggatctggcgaaagagaccgatctggccggcgcgattaaatccatgttctccggcgagaagatcaaccgcaccgaagaccgcgccgtgctgcacgtggcgctgcgtaaccgtagcaatacgccgatcattgtggacggcaaagatgtgatgccggaagtgaacgccgtacttgagaagatgaaaactttctcgcaagcgattatctccggtcagtggaaaggctacaccggtaaggccatcaccgacgtggtgaacatcggtatcggcggttccgacctcggcccgttcatggtgaccgaagcgctgcgtccgtataaaaatcatctgactatgcacttcgtctctaacgtcgatggtacccacatcgctgaagtgctgaagaaagtgaaccctgaaaccacgctgttcctggtcgcgtcgaaaactttcaccacccaggaaaccatgaccaacgcccacagcgcgcgcgactggttcctgaaaactgcaggcgatgaaaaacacgtggcgaaacactttgctgcgctctccaccaacgccaaagcggtcggcgaatttggtatcgacacggccaatatgttcgagttctgggactgggtcggtggtcgttactcgctgtggtctgccatcgggctgtccattattctgtccgtcggtttcgacaactttgtcgagctgctttccggcgcgcacgcgatggacaagcatttctccaccactccggcggagaaaaacctacccattctgctggcgttgattggcatctggtacaacaatttcttcggcgcggaaaccgaagccattctgccgtatgaccagtatatgcaccgtttcgccgcctacttccagcagggtaacatggaatccaacggtaaatacgttgaccgtaacggcaacgccgtggattaccagacaggcccaattatctggggcgaaccaggcaccaacggtcagcacgcgttttatcaattgattcaccagggtactaaaatggtgccgtgtgattttatcgccccggctatcacccataacccgctatccgatcatcatcagaagctgctgtctaacttcttcgcgcagaccgaagcgctggcgtttggtaaatcccgcgaggtggttgagcaggaatatcgcgatcagggtaaagatccggcgcagcttgaacacgttgtgccattcaaagtgtttgaaggcaaccgcccgaccaactctatcctgctgcgcgaaattacgccgttcagcctgggcgcactgattgcgttgtatgagcataaaatctttacgcagggcgtcatcctgaacatctttactttcgaccagtggggcgttgagttgggtaaacagttggctaaccgtattctgccggagttgggcgatgataaagctatttcgtcccatgatagctctactaacggtctgattaaccgttataaagcctggcgcgcctgatggcactgcgcttatccggtctacgtaatgcatagcgtctgtaggccgggtaaggcgtttcgccgccatccggcaaaaagagaataagataataaaaaggccgatattcacatcggctttttttataagataattccgcttgtccgtctttatccccacagttttatattgagcttaatcctaaaataagcaataaccagaaaatcactctgcgttattttcagattatacggatgctgatgtcttttagtttaattttaacttattgattttatttgtttgttaattaaataatgtaggcgttacttctttaaagtttaattatcctaaaacttcgatgttatttctcccggacataatccgcctgctttggttgtgtatactcggtagcgcccgaaattcttttgggtaaatctccattcattcaatgaagggaagttatgatgaaaaaagtactgtatggcatttttgccataaccgcgcttgcggcgacatctgtctcggcagcccccgttcaggtgggtgaagcggcagggtcggcagcgacgtcggtatcggcgggaagctcctccgctaccagcgttagcaccgtaagttcggcggtgggcgtcgcgttagcggcaaccggcggcggcgatggttccaataccggaaccacgaccaccacgaccaccagtacccagtagtatcggtacgtttaaccataaccacactccggtgtggttattttgcccctctggagaagcgtcgtgaagcgactcgcacttatcctgatttgcctgctattacaggcgtgttcggccaccaccaaaggcctgggcgattcactgtgggacagtttgttcggtacgccaggcgtacagctaacggatgacgatattcaaaacatgccttatgccagccagtacatgcagcttaacggcggtcctcaactgtttgtggtgctcgctttctcggaaaacgggcagcagaaatgggtgacgcaggatggcgcgacgatcgtgacgcagcatggccgtctggtcaaaactctgctcggcggcgacaacctgatcgatgtgaataatctggcgaccgacccgctggcgaaaccaggacagattatcgatggcgcgacctggactcgcaccctgggctggaccgaacatcgccaggtgcgttacgccaccgcccgttccgtttttacatggcgagggaccgatagagtgaacgtcggcagtgaggaaaccgccgtgcgggtgttagatgaagaagtgacgaccgatcaaacgcgctggcgtaatcgctactgggttgatagcgaaggccaaattcgccagacggaacagtatctgggcgcgaattactttccggtgaaaaccacgctgattaaggcggcaaaatcatgatgaaaaggacgataagcgcgctggcgctggcctttgtcgcgtcatccgcctttgccagcggcactgttaccgtttttacccagggtaatagcgagcctaaaacgctgacagacgctgagcgtctgctcgatttagtcggacagccgcgcctggcaacgagctggtggcctgcggcggtgataggcgaagaacaggcgaccgtgacggcgcgtcagcagcaacaggaacttctcgggcggctggcggtgctcagcgctgaggaagacggcgatgctgcggcggcgataaacacactgcgccgacagattcaggcggtgaaggtgacgggcagacaattcgtgaatcttgatcctgacgtggttcgggtgagcgaacgaggtaacccgccgctgcaaggtcactacatgctctgggtcggaccgcaacccacgcaggtgacgctctttggcttgattagccagccgggcagccagccgttcgtccctgggcgggacgtcgccagttatctcgaggatcagcgcttactcagcggcgcggatcgtagctatgcctgggtggtttaccctgatggacgcagccaaaaagcgccggtggcttactggaataaacgtcatatcgagccgatgcccggcagcattatttttgtcggttttgccgattccctttggcgcggcacgccggaggcgataaatgccgacattcttcataccctgacgcagcggataccggaataatgaaaaaaacacatctgctcagcgtgctggcgctgggtattagcgcggcctgccatgccgaaacatatccagcccctgttgggccttcacaatctgactttggcggcgtgggcctgctgcaaacgccgacagcgcgtatggcgcgtgaaggggagatgagcctgaactatcgcgataacgatcagtaccgctactactcggcttcggttcagcttttcccgtggctggaaaccacgttgcgctataccgatgtccgtacgaaaaagtacagcagcgtggaatcattctccggcgaccagacttacaaagataaagcgtttgatgtgaaactgcggttgtgggaagagagttactggatgccgcaggtggcggttggcgcgcgcgatatcggcgggacggggctgtttgatgcggaatatattgtagcgagtaaggcctgggggccgtttgatttttcattaggtctcggctggggctatcttggcaccagcggcaatgtgtctaatcctttctgttcgtatagtgataaattctgttcgcgtgataacagctacaaagaggcaggttccgtcgacggtagcgatatgtttcacggcccggcctcgctgtttggcggcgtggaataccagaccccgtggcaaccgctacgcctgaagctggagtatgaaggcaataactatcagcaggattttgcgggtaaactggagcagaagagcaagtttaacgtcggcgccatttaccgcgtcaccgattgggccgacgttaacctcagctacgagcgcggcaatacctttatgtttggcgttacgctgcgcaccaatttcaacgatttacgtcccgcgtatcatgacaattcacgcccgcaataccgaccacagccgcaggatgccatcctgcaacattcggtagtggctaatcaattaacgttattgaaatataatgccggtctggcggacccgaaaatccaggtcaaaggcgatacgctatacgttaccggtgaacaggtgaagtaccgcgactcccgtgaagggatcgtgcgcgctaaccggatcgtcatgaacgatctgccggaggggatccgcacgatccgcgtgacggaaaaccgccttaatctgccgcaggtcaccactgaaaccgatgtcgccagcctgaaacgccatctggaaggcgaaccgctgggacatgaaactccgctggcgcaaaaacgcgtggagccgatcgtgccagagagtactgaacagggctggtatatcgacaagtcgcgcgttgattttcatcttgatcccgtgctgaatcagtcggtaggcggcccggaaaacttctatatgtatcagttgggcgtaatgggaactgcggatctgtgggtcacggatcatctgctcaccacgggcagcgtgtttgccaatatcgccaacaactacgacaaatttaactacaccaatccgccgaaggactcgcatctgccgcgggtgcgtacgcatgtccgtgagtatgtgcagaatgatgtttatgtgaataacctacaggccaactacttccagtattttggcaatggtttctatgggcaggtctacggtggttatctggagaccatgtttggcggtgccggggcggaagtcctgtatcgcccggtagacagcaattgggcgtttggcctggatgccaactacgtgaaacagcgtgactggcgtagcgcgcaggatatgatgaagtttaccgattacagcgtgaagaccggacatttgaccgcatactggacgccgtcgttcgcccaggatgtgctggtgaaagccagcgttggtcagtatctggcgggcgataaaggcggtacgctggagatcgccaaacgcttcgatagcggcgtcgttgtcggcggttacgcgacgattaccgatgcgtcgccggatgaatatggggaaggggattttaccaaaggcgtatatgtttccgtgccgctggatatcttctcgtccggcccaacccgaagtcgtgcggcaattggctggacgccgctgacgcgtgacggtggtcaacagcttggccgtaagtttggcctgtatgatatgaccagtgacaggagcgtaaatttccgttaatactcaggccggataaggcgtttacggcgctatccggcaaattatcttattgaacaaaatataaacataaataaaaaatatagatgcccgtcacatttgtgcgttatacagaaacctcgccgcagagaaagagggggctgttatgatgccattatcgcgctcacgtcttgagtttatcgccacgattttacaaaacgtactaaatttggggctgcttaccctcggtctgatcctggtcgtttttctcggtaaagagacggttcatctggcggatgcattattcgcgcctgagcaagccagcaaatatgaactggtggaagggctggtgatctactttctttatttcgaatttattgcgctgattgtgaagtactttaagtctggccttcactttccgctgcgctatttcgtgtacattgggatcacggcgattgtgcgtctgatcattgtcgatcataaaacgccaatggatgtattactctattcggcggcgatcctcctgttggttatcacgttgtggttatgtaattcgaaccgactacggcgagaataggcgtcgccacaccgtaacggacgtatggcgtggcaataaattagccgctgtctataacgcataaaaaaagcgctccgaagagcgccaaaatacgaccataagtggggataacataacttgagggcagtggcattgcccgttgccgggcaggtacttcgataaaacttaacctttcacaccccctgccgtcaggccgttgaccagccaacgttgcgccaacaggaacaccagggtgataggaatagctgaaaggacggcggcggcggcaaagtcgccccacaggtagttttgcgggttgagatattgctgcatacccacggccagcgtatagctgtccacatcgcgcagtaacaacgaggcgaccggaacttcggtaatcgctgcgatgaacgacagaataaacaccaccgccagaatcggtacggaaagcggcagcagcaccaggcgaaacgcctgccacggggttgcgccatccagcgcggcggcctcttccagcgaactgtcgatagtttcgaagtagcctttaatcgtccaaacatgcagcgcgatgccgccaagataggcgaagatcacgccgccatgcgtattcagcccgataaatggaatgtattgtcccaggcgatcaaataacgcatacagcgctaccagagacaaaaccgccggaaacatttggaaaatcagcatccctttgagcagtgttgctttacctggaaaacgcattcgtgcgaaagcgtaggcgcaggtggtggagagcgccacgatgccgatggcggtaataccggcgattttcaccgagttccacagccacagcaggaccgggaagggaggcggcgttacccgaccatccgcatgttccacgctgaaacccagcgccagccgccagtgttcccaggagattttatccgggatcaggcttccggtggcgaagttcccttcacgtagcgagatagcgatgaccatcagcagcgggaacataatcgctgcgatgaaaatcagcagccccaggtgcgtgatgaggagacgcagtttctgagatttgggttggaccatagccattgttattatctcccttaatcaaacttcatacgcgtggctttcaggttcactattgccagcgcgcctaccagcaggaagatcagcgtggcaatggccgccgccagaccgaagtcctgaccgccgccgccttcaaaggcgatacggtaggtgtagctgacgagtagatcggtataaccggcaggcgtggtggtgccgagacggtctggcccgccgttggtcaataactgaatcaggacaaagttattaaagttaaaggcgaagctggcgatcatcagcggcgttagcggcttaatcagcagcggtaaggtgatcttaaagaaattctgaaatggaccggcgccgtccattgcggaggcttcgtacaggtcatccggaatcgctttcagcagtcccatgcacaggatcatcatgtagggatagcccagccaggtattcacgataatcaccattgcccgcgcggtgttggggtcgctgaaccaggcaggtttaatgccgaacagcgcgctcagcatcatattgatttcaccaaagctttggttgaataaccctttgaaaatcaaaattgaaataaacgacggtacggcgtagggcagaatcagcaggacgcggtagatagctttacctttcagcgcttcccactgtacgaggcaggccaataccatcccaaccgccacggttaacaccacagtgaggaccgaaaagaccacggtccagacgaagatagcgaaaaagggcttctggatcccttcgtcggtaaagacgcgcgtaaagtttttcgcgccgatagtaacggtataaccaggactgagtttttcatcaccccagcttccgtcggcgttgatcgactgataataaccgctatcgttgtttggccggtattttacgccgctctggttattggtcagcaggccgtcatcagccagtgtgtacagcggacgggtaccggaaaactgacgcagcgagctcataatcactttactttcatccggcaggacggcggttatctggttcaacgccagacggttctgggtgattattcgcagattggcgcgttcgccgcccggcagggcatcagtctctttcagctgtaatttttgttcgccgccgaaggaaaatgcgtcagacaggtaatgtttgcccgtttctccgtcggtgagggccagttgccactcgtcgccggtcgggtaaagaccgaagttataggtttttcctgcctgataagaacggtccatcagcacttgctgggcgcgttcaaaggtgagctggttggtgctgctgtagttagtaaaggcgatagcgatggtgcacaccagcgggaatagcacaaacagccccatgccggcgaggccagggtaaacgtagcgccaggcgtaggttttacgatttgcgaaaatatacaggccagcagagcttaaaatcagcgtcatgatggcgaacagatactccccttgtacgtacattaaaactacaaggtaacccaccagcaggcccagcagaccaattactgaccatttaagctggtcgctttgccaccagtgtttctttttaatgacatccatgggggttttcctctacagcgttgaaacttcctggccggagatgtgcctgatggcgctgcgcttatcaggcctacggtgtgttgtaggccggataaggcatttatgccgccatccggcacaggctcacggcattacttagtgatacggctttgtgcatctttcagcgcggcatccacggtttgacggccgctggcggcgttgatcacagccgtacgtaccgcataccagaaggcggacatctgcggaatattcggcatgatctcgcctttctgggcgttatccatggtggcggcgatacgggggtctttcgctaactgctcctggaaagatttcagcgccacggcgcccagcggtttatctttgttcaccgcttccagaccctgatcggtcagcaggtagttttcgaggaactctttcgccagctctttattcgggctggcagcgttaatccccgcgctcagcacgccgacgaacggtttcgagggtttacctttgaaggtcggcagcagggtgacaccgtagttgactttgctcttgtcgatgttcgaccatgcccacggaccgttgatggtcattgccgtttcgcctttattgaaggccgcttcggcgatggagtaatcggtatcggcgctcatatttttgttcttgatcatatcgatcaggaaagtcaggcccgctttcgcgccggcgttgtcgacaccaacgtctttcacgtcatacttgccgttttcaaatttgaacgcgtaaccgccgtcagcggcgatcaaaggccaggtgaaatacggctcttgcaggttgaacattatcgccgacttccctttcacttttagctctttatccagcgccgggatctcttcccaggttttcggcgggttcgggacgaggtctttgttataaatcagggagagggcttcaacggcgatggggtaggcgatcagcttgccgttataacgtaccgcatcccaggtgaacggatagagtttgtcctgaaacgctttatccggagtgacctccgccagcagaccagactgcgcgtagccgccaaaacggtcgtgcgcccagaagataatgtcaggaccgtcgccggtggctgccacctgcgggaatttctcttccagcttatccgggtgctcaacggtcactttaatgccggtgtcttgctcaaattttttaccgacctcggccagaccgttataacccttgtcgccgttgatccagataaccagtttaccttcttcaattttggcgagagccggggcggaaatcatcatcgtcgtaagtgcggataatgcgaggatgcctacgccagttttaatcttcatatctcccatcctttttggtgatgtacacagaggtggtttaacggtctctagtttctttatacgacaacctctttccatcctccccgcccctacgccccaccccggctttatgtgatctgtgttgcataaatgtgagtaatgcgtgctggcgcacacaaaaacacgccgatttttgcgggcggcatcacgaaattccttttctgtccgcgcccgtggtctcaggtgttgtgtcctcatcctcccgcctcctcccccataaaaaagccggggggtggaggatttaccccagtcagggatcgcgcatagtcaggccatcatgaatgttgctgtcaatgacaggttgtaacgaagggagaagggcatggcgagcgtacagctacgaaatgtaacgaaagcctggggtgacgtggtggtatcgaaagatattaacctcgatatccatgacggggagttcgtggtgtttgtgggaccgtcaggctgtggtaaatcgaccttgctgcgtatgatcgccgggcttgaaaccatcaccagtggcgacctgtttatcggggaaacccgtatgaatgatattccgcctgccgagcgcggcgtgggcatggtattccagtcttatgcgctctatccccatctctccgttgcagaaaacatgtctttcggcctcaagctggcgggcgccaaaaaagaggtaatgaatcaacgcgtcaaccaggtggcggaagtgctgcaactggcgcatctgctggaacgtaagccaaaagcgctttccggcgggcagcgtcagcgcgtagcgattggccgcacgctggtggcggagccgcgtgtgtttttgctggatgaaccgctctctaacctggatgccgcgctacgcgtgcagatgcgcattgaaatttctcgcctgcataaacgtctgggccgcacgatgatttacgtcacccacgatcaggtcgaggcgatgaccctggccgacaaaatcgtggtgctggacgccggtcgcgtcgcgcaggtcggtaagccgctggagctgtaccactatccggcggaccgttttgtcgcgggcttcatcggctcgccgaagatgaacttcctgccggtgaaagtgaccgccaccgcgattgaacaagtccaggtcgaactgccgaatcgccagcaaatctggctgccggtcgaaagtcgcggcgtgcaggtcggcgccaatatgtctttaggcattcggccggaacacctgctgccgagcgatatcgccgatgtcaccctggaaggcgaagtccaggtggtcgagcagttagggcacgaaacacaaattcatatccagatccccgccatccgtcaaaacctggtttatcgccagaatgacgtggtgttggtagaagagggcgccacattcgctatcggcctgccgccagagcgctgtcatctgttccgcgaggatggcagcgcatgtcgtcgtctgcatcaagagccgggtgtttaaggcctccataaaaaaacgaaacgcaaaaccattcgcagttttagaaggtggcagcgtttaaagaaaagcaatgatctcaggagatagaatgatgattactctgcgcaaactcccactggcggttgctgtcgcagcgggcgtaatgtccgctcaggcaatggctgtcgatttccacggttacgcccgttccggtattggctggacgggaagcggcggcgaacaacagtgtttccaggcaacgggtgcccaaagtaaataccgtctcggtaacgaatgtgaaacctatgcggaactgaaactgggccaggaagtgtggaaagagggcgataagagcttctatttcgacaccaacgtcgcctattcggttaaccagcagaacgactgggaatcgaccgatcccgccttccgcgaagcgaacgtgcagggtaaaaacctgattgaatggctgccgggctctaccatctgggccggtaagcgcttctatcagcgtcatgacgtacacatgatcgacttctactactgggatatttcaggtcctggcgcaggtatcgaaaatatcgatctgggcttcggtaagctttcactggcggcgacccggtctactgaagcgggcggctcttacaccttcagcagccagaatatttatgatgaagtgaaagataccgctaacgacgtctttgacgtacgtctggctggtctgcaaacgaacccggacggcgtactggagctaggcgttgattacggtcgcgccaatacgaccgatggttataagctggctgatggggcatcgaaagacggctggatgttcaccgccgaacacacgcaaagcatgttgaaaggctataacaagtttgtcgtgcaatatgccaccgatgccatgaccacgcagggtaaaggccaggcgcgcggttccgacggttcttcatctttcactgaagaattgtctgatggaaccaaaattaattacgccaataaggtcatcaataataatggcaatatgtggcgtattttggatcatggcgccatctcgcttggtgataaatgggatttgatgtacgtcggtatgtaccagaatatcgattgggataataacctgggtactgagtggtggaccgtgggtgtacgtccaatgtacaagtggacgccaatcatgagcaccctgctggaagtcggctacgacaacgtgaaatctcagcagaccggcgatcgtaacaatcaatataaaatcaccctggcgcaacagtggcaggcgggcgacagcatctggtcgcgtccggctatccgtattttcgccacctacgcgaaatgggatgagaaatggggctatatcaaagacggcgataacatttcccgttatgccgcagcgactaactccggcatttccaccaacagccgtggcgatagcgatgagtggaccttcggcgcccagatggaaatctggtggtaatacgatggtcatctgacgtaacgaggggcgcaagcccctcggaaacatcaggtctgatgatgcttgtaagccgaataaggcgccagccgccattcggcgatatgtttgggttggcgcgctattgcctggctaccgctgaacccgccttattgaggtgagaataatgaaaatgaagaaaagtctcgtcgccctctgtttaaccgcagggctgttcgccagcgtgccgggtatcagcctggcggaagtgaactatgtaccgcaaaataccagcgccgcgcccgttattcctgctgctgcgctacagcaattaacctggacgcctgtagatcagtcaaaaacgcagtctacccaactggcgactggcggccagcgccttgacgtcgccggcattaccggcccggtcgccgcttatagcgttccggcgaatatcggcgagctgacattaactctgaccagcgaggtcaataagcaagccagcgtttttgcgccaaacgtgttgattcttgaccaaaatatgacgccttcggcgttcttccccagcagttactttacttatcagcagccgggcgtcatgagcgcagaccggctggaaggcgtgatgcgcctgacgcctgcgttggggcagcagaaactctatgttctggtgtttacgaccgaaaaagatcttcagcaaaccactacgctgctcgatccggcaaaagcctatgccaaaggcgtcggtaactctatcccggatattcccgatccagttgctcgccataccactgacggcgtggtgaaactgaaggtgaaaaccaacagcagctccagcgtattggtcgggccgttgtttggctcgtccggtaccgggccggtaacggtaggcaataccgccgcgccggtcgctgcgccagcgccagtcgcgccgaagaaaagcgagccgatgttgaacgatacggaaagctactttaataaagcgattaaggatgccgtagcgaaaggcgacgtcgataaagcgctgaaactgcttgatgaggccgaacgtctgggatcgacatctgcccgttccacctttatcagcagtgtaaaaggcaaggggtaattatttccccacagtgctgattttgcagcaactggtgcgtctcctggcgcacctttttttatcatttcatgcgaattgttatttttttgttgcgcaacagatcacttaattgtgattgcgccccccgtaatgtcttttctgagatacaatgactttaggttatgaatcggagagtaaggcatgtcacaccctgcgttaacgcaactgcgtgcgctgcgctattttgatgcgattcctgcgcttgaaccccatttgctggactggctgttgctggaagattctatgactaaacgttttgagcagcagggaaagcgggtaagcgtgacgctgattcgggaagcgtttgtcggccaaagtgaggtcgaggaagcatcaggtttactgccatccgagtcccgctactggttacgtgagatactgctttgcgctgacggcgagccctggcttgccggacgtaccgtggtaccggaatccacgctgtgcggacctgaacaggtcttacaacatctgggtaaaaccccgcttggacgttatctatttacatcatcgacactgacccgcgattttattgaaattggacgcgatgcaacgctgtgggggcgccgctctcgactgcggttgagcggaaaaccgctgttgcttaccgagctttttttacctgcatcgccgctgtactgagaggaagataaagatggagtggagtctgacgcagagtaagctgctggcgtttcaccgtttgatgcgtacagataagcctattggcgcgttgctgctgctctggccgacgctttgggcgctatgggtggcgacgccgggtatgcctcagctgtggattttggcagtttttgtcgctggcgtgtggttaatgcgcgcggcgggctgcgtggtaaatgattatgccgatcgtaaatttgacggacatgtaaaacgtacggtcaaccggcctttacccagcggcgccgtgacagagaaagaagcgcgcaacctgtttgtggtgctggtgctgctggcgtttctgttggtgctgacgctgaacgccatgacgattctgctttccgtggcggcgctggcgttggcctgggtttatccctttatgaaacgctacacccacctgccgcaggtcgtgctgggggccgctttcggctggtcaatccccatggcgttcgccgcggtgagcgaatccctgccgttgagctgctggctgatgttcctcgccaatattctctgggcagtggcttacgatacgcaatatgcgatggtcgacagagatgatgatatcaagataggcattaaatcgacggcgatcttgtttggtcgttatgacacattgattatcgggattctgcagcttggcgtcatggcgttaatggcgctgatcggctggttgaatggtctgggatggggatattactgggctgtgctggtggcgggcgcgctgtttgtctaccagcaaaaactgattgcgaaccgtgagcgtgaagcctgctttaaagcctttatgaacaataactacgttggcctggtgctatttttagggctggcgatgagttactggcacttctgatgtcatgccgggcggacccggcctacaaagccaaaattttcaatacgtcatatcagttgcccgataagcttacgccatcgggcatttcaggcactggcttactcgccctgcgtcgcgctttcaatcgtcagacggacatcagaggtaatcagatcggcaagcatctgatatatcttcatcgtttctgccggttcggcatcgcccgtatcactgatataaccctcatcccgtagcgtcaacacgagtgaactgaacaccgctttgtcgaaaaactccggcgcgttaataccgtgcaggacagacagacgttgcgccacggtacggctttctttctccagcgtactgcggttgatggacggattggcgctcaacagccagaacgtaatggcataacgctgtagcgtttcgcgcgcgcctgccgccagcagttgcagcgtacgggaatgcgtcgggttgatatgcagttcatcatcctgcagggtaattagcccctgacgctgcatttcactggccagcgcgtcaatgaccgaggctaactcctcgcgctcccagcgcaggaacagctccgcttttaacatcggatagagcgcttcaacatgctgctgcaacgcatcacgcgaaatgcgacgatgctgggtgataatcgccgccatcagcgaaggcataatcaacatatgcgcgatattgttacgatagtaggtcatcaacaccgcctgctcgcgcggcagaatgatgatatcgccaatggtgtctttctcgacctcaaacttattcatctgcagcgcgtgagcgataagctcgccagcgctggcggcaggaacggttgagtctgtggaataagggacattgcgcatcagatcgagatagcaatcaagctgctcggtgagctgctcgcgggtgagcgagcgctgacgcgacgctaacagcgcggtacaacacaggttcatcgcgtttgccgcgccagcgttgttaatacgcaccatcagatcggcggcgatactatttaccgtcggcgtcagccaggctgggcgtatggcctctatagggtcgatagattcgcgccactccggcacatgctggttcaggtacgtcatgagcggcatcggttcgccaaagttaacgtagccctgacccagattgcgcagcttgctcaagcctttcagcatctgcggcaggctctctttctcttttgtcgcgccgcgcagttctttcgcataggtgcccacttccatgacgtgctcatagccgatgtaaataggcactaacgtaattggacgggtaccgccgcgcagcatcgcctggatagtcatcgacagggtgccggttttcgggtctaacaaacgtccggtacgcgaacgtcctccttcgacaaaatactcaaccgagtaaccgcggctgaacagttcgcccaggtattcgcgaaagacggtggaatagagtttattccccttaaaggtgcgacgaataaagaacgcgcccagacgacggaaaatcgggccagcgggccagaaattaaggttaataccggcggcaatgtgcggcggaaccagtccctggtgatacagcacataagaaaggagcaagtagtccatatggctgcggtgacagggtacatagacgatttcatgcccgtcgtgcgccagttggcgtacgcgctcggcgttatgcacgttaattccctggtaaagtcggttccaggtaaaccccaaaatcctgtcggtcaaacgaatcatctcgtaagagaagttcgccgcgatctcttccatcagcgcaatggcgttttgctgcgctttttcatgagagatttttttactgcgcgcttcgtcttctaccgcgcgggcgatcgctttcgaggccagcagtttgttaaacagatcctgacgggcaggcaggcgtgggccaaccgccgccaggcgctggcgagcaaagtgcatacgcgccacgcgagccagcttctgcgcgatgattttatcggtgccgtgttcatcagccatacgacgcaatgagacggacggcgagaatcggacaaagctatcgcgacccagccaggagatggcaaagaatttctgtacgccgttcagcatacgtaaaggcgggttatcttctcccttttcacgacccggcgcgcggccaaacatcacggaaacgggcaccatctgcacgtccaaagccggattactccgatgcagatcgagataatcgtgaaaaagtttcaccgactcttcttttggcgtgtaataggtaaagacacgcggtccgccgtgaataaatacatagcgtggcaacagcgcgccgtcgatctccagcggctccagcggatccgggagatcgtgcgccagacattgcgcccgcagcgtcagtaagtccgcttttgagttgtatggcaagacatacataatggggcgagaagtatcgagccccaattcctgggcgggttccgccggaatagacttgctttttaccagtatgcttaatggtaaattcagtaatttgtagtaaattcgtggccagccggacataaacgatgtaaagcctctggttaataatgcaaatgcggtgcaaggatatcagaaagtttagcgaatttctgttgtatcccgtcatacttcgcgctgcgttacggcagtccgaatcgtgcagggcaaccgtataatgtcattgacgttaataatgtaaaaaggttcttttgatggccaataataccactggattcaccagaattatcaaagcggcaggatattcctggaaaggatttcgcgccgcatggactcacgaagcggcgtttcgccaggaaagcctcgcggtattgctgggcgtcatcatcgcctgctggctggatgtggatgcgattacccgtgtgttattgataggttccgttttacttatcatgattgttgaaatcctcaacagcgctattgaagcggtcgtggaccgcatcggttctgaataccatgagctttccggccgtgcgaaagatatgggatcggctgcggtgctactgtctattttcgttgccctgatgacctggggcatcctgttatggtcacattttcgataaaggttccaaattttataaatctcttgttttttgcgccgtttgtggttccaaaatcacctttaactgtatatactcacagcatgattgtatatacacccagggggcggaatgaaagcgttaacggccaggcaacaagaggtgtttgatctcatccgggatcacatcagccagacaggtatgccaccgacgcgtgcggaaatcgcgcagcgtttggggttccgttccccaaacgcggcggaagaacaccttaaagcgctggcgcgcaaaggggtgcttgaaatcgtttccggcgcatcgcgaggtatccgtctgttacaggaagaagaggacggattaccgcttgtcgggcgtgtcgcggcgggtgaaccgcttctggcgcagcagcatattgaaggccattaccaggtcgatccttcgctgttcaaacccagcgccgatttcctgctgcgcgtgagcggtatgtcgatgaaagacatcggtattatggatggggatttgctggcggtacataaaacgcaggacgtccgtaatggccaggtggttgtcgctcgcattgatgatgaagtgacagtaaaacgcctgaaaaagcagggcaataaagtggagctgctgccggaaaacagcgagtttacaccgatagtggtggatctgcgcgaacaaagctttacgattgaagggctggcggtaggcgtcattcgcaacggggaatggttgtagtctctttttaatctccttgtaagccgccatccggcaatcgtgtagcctgatggcgctgcgcttatcaggcctacgggaatgcagttcctgagatgattaatttgtaggccggataaggcgttacgtcgccatccggcaatgcgctcgtttcgtttaactccttgtcaggcttttctccatgccgctttttacctcctctgataaagctctctggcgtcttgcgttgccgatgattttttctaacatcaccgtccccttactggggctggtcgatacggcggtgattggtcatctggacagccctgttttcctgggcggcgtggcggtgggcgcgactgccaccagctttcttttcatgctgctgctatttctacgtatgagcaccaccggcctaacggcgcaggcatttggcgccaaaaatccgcaggcgttagcccgggcgctcattcaaccgttattgctggcgctgggcgcaggcgtgatgattgtgctatttcgcacgccgcttatcgagctggctttacatattgtcggcgggaacgacgctgtcctggtgcaggcgagacgcttccttgaaattcgttggctaagcgctcccgcgtcactggcgaatctggtgctgctcggttggctgttaggcgttcagtatgcgcgggcgccggttatcttgttggtcgtgggcaatatcctcaatatcgcgctcgacctgtggctggtgatggggcttcatatgaacgtgcagggtgctgccctggcgacggtcatcgcagaatatgtcacgttactgatcggcctcatgatggtacgtaaagttctccatctccgcggtgtgtcgctggatatgctaaaacaggcctggcgcggcaacgtgcgccgccttttggcgctcaatcgcgatatcatgctgcgctcattgctccttcagctttgttttggcgcaatcacggtgtcaggcgcgcggctgggcagcgatattatcgcggtaaatgcagtcctgatgaccttactcacctttacggcctatgcgctggacggttttgcttatgcggtggaggcgcactccggtcaggcttacggcgcgcgtgacggtagcaagctactggacgtctggcgagcggcgtgtcgtcagtcaggaattgtggccttgttgttttccacagtctatgccctggcaggcgaacatattgtcgcgttactgacctcattgccgcaaatacagctactggcggatcggtatcttatctggcaggtggtattaccgctggtgggcgtatggtgctatctgctcgacggtatgtttattggcgcgacgcgcgctgccgaaatgcgcaatagcatggcagtcgccgcgggaggattcgcgctgacgctcttcgccctgccggtattaggaaatcatggtttatggctggcattaaccgtgttcctggcgcttcgcggtctgtcgttgagccttatctggcgtcgtcactggcgcgagggtacatggtttgccagatcgtgacggttaaaaattctgaatataaaaccgaaggccgaattcctgcctacaattattatcacgtccagcagaaattgcagagcatttgggcgaataacacctgctattcctaaccgaatgatgaggacaagatgatgaataaagacgaagccggcggtaactggaaacagtttaaaggtaaaatgaaagaacaatggggcaaactgaccgatgacgatatgaccgttatcgaaggtaaacgcgaccaactggtaggtaaaatccaggagcgttacggttaccagaaagatcaggcggaaaaagaggttgttgactgggaaacccgtaacaactatcgctggtaatatgttttcccctaccaggagtacatggatgtgcttccccctgtttgcttatgaatgcgggcgtgcccctctctactgccgcccgttttccgttcaggctaacgtggttttttcttcaccagcaccgagtgatcgtgaccacagtttcccggatggcgacacgcttctacttctacgcacgcagggcacagaccgtgcgcctcaataacgttatgtcgtagcgcaaagcccattttagccgccagcgtatgcatgatgtcttccacgccctcggcacactcttccttcaccacgccgcaacgatcgcagataaacatggccgagctgtgcgtcggctggtcgaacaggtggcaaaccacataactattggtggattccactttatggacaaaaccctgttcgagcaaaaaatccagcgcgcggtaaatggtgggcggtttggcctgtggttccgtttcgcgcagcaaatcgagcaaatcgtatgcgctgatggcaccctgttgcagactcatcaggcgcagcacttcgaggcgctgaggcgtcaggcgcacgttgcgctgcgcgcagagtttttcagcttgcgccagtaactcttgcgttgtggtcttttccatgtagcacctcgaatggcatgaaagtctaatccgttactttaccacgagctgcttaagactctgaaattaccccgcgacaatatatcgcctgctaagcttttccgcgccagtattctcatctatacataatgagggtcgatattataacaacaggatttaacatcactatttcacagcaatagttcgcctctgtccggtaaagcgtggtggaggaattacttcacctgataataagatgggctaactgtgaacaaaaacgtcaaactttcactgattgctatcgcggtctcgctttttatggcaaagcaggcgagcgccgccaatacctggacggaagcgcgtaatgacgcaatgggcgggacgggcgttgcgtccgcgaattatggcagcggagtactattaaatccggcgttactggcaaaagccaaaccggaagacaatatcactgttgtccttcctgcggtcggcgtccagattacggataaagacaatctccaggatgaaattgacgatatcagcgataaagtggattactacgatgaggtcgtcgataaccttacgctggggcaaattctgctcaatccgcgaggcgtgctgaatcaatttcagggcgccgcgcgcgacctggccgatgagctggaatatctcaacggaaaaaccgcccgcgccaatgccggcgccgggttggcggtaagtattccagggcaaacgctttccgtggcgtttatcgccaaaggttatgcgcatgggcgcgtgagttcgtccattgatcagaacgatattcagtatctgcgcgatatccagcatgatgaacgtgtcgcgcttcgtgaagcaggacgcgctgctttgctggggtctgacgaaattacaaagcatttaaactctaccgcgtcggggcgggtagcgattgtatctgactacggtattgcgctggcgaagcagtttgtggtgggcgaggtgcctgtttccattggcgttacgccaaaactgcaaaaaacctggctctataactacaccacctcaatttataactacgacagtagcgactggaatagcagccgttatcgcaatgacgatacgggttttaacattgatgcggggcttgctgccgatatcggtgaaaactggacgctgggggtgagcggacaaaatctggtatctcgcgatatcgatacgaaagatatttacatcactaatggtatgacgggagaaaccaccaactacaaagatacataccaaatccgccccctggttaccgcgggcatcgcatggcataacgatttgctgaccgtaagcgccgatggcgatctgacggaaacgaaaggctttaagagcgaagacaattcacagtacgttggcgtcggcgctgaagttcgaccgttgtcatggctggcggtgcgcgcagggtatcgtgcggatgtgaaaaataacgatagcaatgtggttaccggcggtcttggctttgcgccctttaaccgtgtgcatctcgatttaatgggactgtacggcgaagatgaaacctggggggcaggcgcgcagcttacaatgacattctgaggtgctttcaccggaggcgctacgcctccggtttagcgttatgctatagtaacgccccttttttaaccggatgcttatttattcgccatgcagcctgaaacccagtcctccgctttacctgcttatcgcttctccatcgcgcctatgctcgactggacggacagacattgccgctatttcctgcgtttgctgtctcgccagacgcagctctacaccgaaatggtgaccacgggcgcgattattcacggtaagggtgactatctggcttatagcgaagaagagcatccggtcgctctacagcttggtggaagcgatccggctcagcttgcgcattgtgcaaagctggcggaagcgcgtggctacgatgaaattaacctcaacgtggggtgcccttccgatcgcgtgcaaaacggtatgtttggcgcctgtttgatgggcaatgcgcaactggtcgccgattgtgttaaagccatgcgtgatgtcgtctcgattccggtgacggtaaaaacccgcattggtattgacgatcaggacagctatgcgtttctgtgtgatttcatcgatacggtttccggtcagggcgaatgcgagatgtttattatccatgcgcgcaaagcctggctttctggcttaagcccgaaagaaaatcgtgagatcccgccgctggattacccgcgcgtctatcagctaaagcgggattttccgcacctgaccatgtccattaacggcggcatcaaatcgctggaagaggcgaaggagcacctgcgccatatggatggcgtcatggttggccgcgaagcttatcagaatccgggtatactggccgcggtggatcgggagatttttggcgccgataccaccgatgccgacccggttgcggtggttcgcgcgatgtatccctatattgagcgtgaattgagccagggagcgtatctggggcatatcactcgccatatgctggggttgttccagggcatccccggcgcgcggcagtggcgtcgctatctgagcgaaaacgcccataaagctggcgcggatgttgctgtactggagcaggcgctaaaactggtggcagacaagcgttaaaagttcgccaaaaattagtcaatctcaccacgccctgtgcagtcttgcagggcgtttttcttatatatcaataatataaatattggcatgatttttgtaagggcttacctgaccagacccggtaagcgccgtgccgccgggcaatgccatttttatggggagcgactatgctggaactactttttgtgcttggcttttttctgatgttaatggtgacgggcgtctccttgctgggcattctggccgcgctggttgtagcgactgccgtcatgttcctgggcggaatgttcgccctgatgatcaagctgttaccgtggctactgctggcggtggctgtggtgtgggtgatcaaagcagtaaaaacgccaaaaatcccacagtatcagcgcaataaccgtcggttttactaaggtattgagcggttcgtcacaacctggaactttgccctcacaagcaaataggaatcgattattaaatctgtcatgattgcgcaggtaacgaattcatcgcgctgtaccctacatacagccgaacaaaaaaagaaagggcttcccgggtggaagcccaatttctttgcagagctattacggaatcagcaggcttgagccctgtgtggcccggctttccagcacttcatgcgcgcgacgggcatcttttaacgcatagcgttgattttcagccacatcgactttaatcacgccgctggcgatcaatgagaacaattcattgctggcttcggtcagttcttcacgtgtcgtaatatacccctgtagtgaaggtcgcgtggcatacagggaacctttctgattcagaatacctaaattcacgccggtgacggggccggacgcattgccgaaactgaccatcagtccccgacgttgcaggcagtccagtgaggcctcccaggtatctttccccacggagtcatagaccacgcggacttttttgccgccggtgatctcttttacccgttcgacaatgctctcctcacggtaattaattacctgccaggcaccggcgtccagcgcccgctgcgctttttgcgcgctaccgacggtaccgataagcttcgcgcccagcgcttttgcccattggcaggcgatcagaccgacgccgcccgcagcggcatgaaacaggaagggttcgtcgggtttcacttcataggttttgcgcaacaggtaaaaaacggtcaatcccttgagaaaagaggctgccgcctgttcgaaagaaatggcgtcaggcaaaatcgcggctttatctgcggtgacgttatggacggaactgtaagcgccgagcgttgactgcgcgtagacgacgcgatcgccgacgcgaatgtgctccacgccgttgccgactttactgaccacacccgcagcttcggttcccaggcccgcaggcaacgacgggggcggatagagtccgctacggatataggtgtcgatgaagttgataccaatggctttgttctcaacctggatttcgtgttccgccggttccgctggcgtaaactccacggtctgaagcacttccggaccaccatgcttgtgaaattcaatacgcgttgccatgcttcctccaaaagaaatgtggtaatctttcgacccaatcactatctcggtaactccattcactatggcaggaaataaacccttcaacaaaccacagactgatgcccgcgaccgcgatccgcaggttgccgggataaaagtgccgccgcactcgattgaagcggaacagtcggtgttgggcggtttaatgctggataacgagcgctgggacgatgtggccgagcgcgtggtggcggaagatttctatacccgcccgcatcgccatatctttacggagatggggcgcttgcaggaaagcggcagtcctatcgacctgattacgctcgcggaatcgctggagcggcagggccaactggacagcgtcggcggtttcgcctatctggcggagctgtctaaaaacacgccaagcgcggcgaatatcagtgcttatgcggacattgtgcgcgaacgcgccgtggtccgcgatatgatcgcggtggcgcatgaaattgcggacgccggttacgatccacaggggcgcaatagcgacgaactgctggatctggcggagtcgcgcgtcttccagatcgcggaaaaccgggccaacaaagacgaaggtccgaaaagcatcgaccagattctcgacgccaccgtggcgcgtattgagcagttgttccagcaaccgcacgatggcgttacaggcgtggataccggctatcaggatctcaataaaaagacggcagggttacagcgttcggatttgattatcgtcgcggcgcgtccctccatgggtaaaaccacttttgcgatgaacctctgcgaaaatgcggcgatgttgcaagataagccggtactgatctttagtctggagatgcccggcgaacagatcatgatgcgtatgctggcctcgctgtcccgcgtcgatcagacacgtattcgtaccggtcaacttgatgatgaagactgggcgcgaatctccggcacgatgggcattctgctggagaaacgcaatatgtatattgacgactcctcaggtcttacgccgacagaagtccgttcgcgcgcgcggcgtattttccgcgaacatggcgggttaagtctgattatgatcgactacctgcaattgatgcgtgtgccgtcgctttctgataaccgtactctggaaatcgccgaaatttctcgctcgttgaaagcgctggcgaaggaactccaggtgccggtcgtggcgctatcgcagcttaaccgctccctggaacaacgcgcggataaacgtccggtgaactccgacctgcgtgaatccggctctattgaacaggatgccgacttaattatgtttatctaccgtgatgaggtttatcacgagaacagcgacttaaaaggcattgctgaaattattattggtaagcaacgtaacggtcctatcggtacggttcgtctgacgttcaatggtcagtggtcgcgcttcgataactatgcgggaccgcaatacgatgatgagtaactctccgtcattcttttaacaaggaattcaaatgcaagcggcaacagtcgtcattaaccgccgcgctctgcgacacaacctgcaacgtctgcgtgaactggcgcctgccagtaagctggttgcggtggtgaaagcgaacgcttatggacacggtcttctggagaccgcgcgaacgctccctgatgctgacgcttttggcgtggcgcgtcttgaagaggctctacgtctgcgagcgggcgggatcacgcagccaatcctgctgctggagggttttttcgacgccgccgatttgccgaccatttccgcgcaatgtctgcataccgccgtacataatcaagagcagcttgccgccctggaggcggtggagctggcggagccggtaacggtctggatgaagctggataccggtatgcatcgtctcggcgtgcgtcccgaagaggcggaggcgttctaccagcgtctgacgcactgtaaaaatgtacgccagccggtgaatatcgtcagccattttgcccgtgcggatgagccggaatgcggcgctaccgaacatcagctcgacatttttaatgccttctgtcagggtaaacccggtcagcgctctattgccgcgtctggcggtatcctgctgtggccgcagtctcactttgactgggcgcgtccgggcatcattttgtatggcgtatcgccgctggagcacaaaccctgggggccggattttggttttcagccggtgatgtccttaacctccagtttgatcgcggtgcgtgaccacaaagcgggcgaaccggtgggctacggcgggacatgggtgagtgagcgcgacacgcgcctgggcgtggtggcgatgggttatggcgatggctacccacgagcggcgccttccggtacgccagtactggtcaatggtcgtgaagttccgattgtcgggcgggtggcgatggatatgatttgcgtagatttggggccaaacgcgcaggataacgcgggcgatccggtggtcttatggggtgaaggtctgccggttgaacgtatcgctgaaatgacaaaagtaagtgcttacgaacttatcacgcgcctgacctcaagggtggcgatgaagtatattgattaaatacgcggcgggccgggtggcgcttgcgcttatccggcttgtatcgcgcattggctgtaggccggataagacgttcacgccgtcatccggtaatatgcgcatccaccacaacatcctctcgatcttctcgtccttccggtttattgtgttatttcctgccctctgtaaacctggagaaccatcgcgtgtttcaaaaagttgacgcctatgccggcgatccgattctttcactgatggagcgttttaaagacgactcccgtcacgacaaagtgaatctgagcattggcctgtattacaacgaagacgggattatcccacagcttaaaacggtggccgaagccgaagcccggcttaacgcgcagccgcatggcgcttcgctgtacctgccgatggaaggactcaatacttatcgccatactatcgcgcctttgctctttggcgccgatcacccggttcttcagcaacagcgcgtggccactatccagacattaggcggctccggcgcgctgaaagtaggcgcggatttcctgaagcgttatttccccgacgcaggcgtatgggtgagcgaccccacctgggaaaaccatattgcgatatttgccggggcaggattcgaagtgagtacttacccctggtatgacgacgcgactaacggcatccgttttaacgatctgctggccacgctgaatacgttacctgcgcgcagtatcgtgttgctgcacccctgttgtcacaacccgaccggggcggatttaacgccttcgcaatgggatgcggtgattgaaatagtgaaagcgcgcgatctgattccgtttcttgatattgcctatcaggggtttggcgcaggcatggacgatgatgcgtacgttattcgcgccattgccagcgctgggttacctgcgttagtcagtaattctttttcgaagattttctcgctgtacggcgagcgcgtcggcggcctgtccgtggtgtgtgaagatgctgaaatcgccgcgcgggttctgggacagctaaaagcgacggtgcgccgaatttactccagtccgccgtgtttcggcgctcaggtggtcgctacggtcctgggcgatgaggcgttaaaagcgggctggctggcggaagtcgacgcgatgcgtaaccgcattatatcgatgcgccagacgctggtgaaggagctgaaggcggagatgcctgaccgcaactttgattacttgttacagcagcgcggtatgttcagctataccgggttaagcgaggagcaggtcgatcggttgcgcgatgagtttggcgtttacctgattgccagtggccgcatgtgtgtcgccgggcttaatgcttcaaatgtacaccgcgtggcgaaggcatttgccgctgtcatgtaatattcaggccggacggcgataacagtgccctccggcctgacaatagctgttgtgatcatcctcttttttcgtaacaaaaccgcagataatccttccttttgaccgttactggcgttatggtcagatagttttttgagcaaagactcatcttaataattataatattttgaattttaagggaaaaccatgaaaaaaataaccctggcgctgagtgccgtctgtttgttgtttacgctaaaccattccgcgaatgcgttagtatcttccccttcgacgctcaatccgggcactaatgttgcaaaactcgcggaacaagcgcctgtccattgggtctctgtcgcccagattgaaaacagcctcaccggacgcccgccgatggcggtcggctttgatattgacgacaccgtgttattttccagccccggattctggcgcggaaagaaaacctactccccggacagcgacgattatctgaaaaatccggccttttgggaaaaaatgaacaacggctgggatgagttcagtattccaaaagaagtggcccgacagctcattgatatgcatgttcgccgtggcgacagtatttactttgtcactggtcgtagtcagacgaaaacggaaaccgtgtcgaaaacgctggcggataacttccatattccggcggcgaatatgaatccggtgattttcgccggcgataaaccggaacaaaatacgaaagtacagtggctgcaggagaagaacatgcgtatcttctacggcgattcggataacgatattaccgcggcccgtgattgtggtatccgcggtattcgcatcctgcgcgcggctaactccacctacaaaccgctgccgcaggcaggagcgtttggcgaggaagtcattgtcaactcggagtactaaaaatcaggagagcgacaggctctccttttttgcatgatttttgcacaaacttgccccgctggcttttaccttttccagacttgctgcacactattcaggagacgtttgtttttaggaaggagcagcctatgtggtatcagcgcaccattacactgagcgagaagccgcgcgggtttcatctgataacagatgaaattaccgataaattgtctggcttaccgcctgtcgaaacgggtttgctgcatctgttgttgctacatacctcggcctcgctgacgttaaacgaaaactgcgatcccaccgtgcgcgctgatatggagcgccatttcctgaaaaccgttcccgataatgcggcgtatgaacatgattacgaaggcgcggatgacatgccttcgcatattaagtcgtcagtattgggcgtctcgttgctgctgcctgtacgccaggggcgtttacagttaggaacatggcaaggtatctggttgggagagcaccgtattcacggcggtccacgtaaaatcatcgcgacactacaaggggaatgataatgaccatttcggaattactgcaatactgcatggcaaaacctggcgcagagcagagcgtccacagcgactggaaagcgacgcaaattaaagtggaagatgtacttttcgcgatggtaaaagaagttgaaggacgcccggcagcctctctcaaaaccagcccggaactggcagagttgttacgtcagcagcacagcgatgtacgaccgagtcggcaccttaataaagcgcactggagcacggtctatctggacggctcgctgccggattcacaactctattatctggtcgatgcctcttatcaacaggcggtaaatgcgctgtcggaagataaacgcaagcagttgccgcagtcctgattatagcgcgccgaccaacaacgccagggcgatatcaatgaggcggatgaccgtagaccggatacggctgccgagggcgatttgcgcattattggcgcgtagcctggcgaggtcccgctgtccttccagcagaataatcatatcgtcgtcgtccagccagccgcgagcatgttcctgaagcgcgcgggcgataaacgcggcggactcgcggatagcgtcgtcgctgtcttctcttgcctgcttatacgtctggataaactcggcaatcgccgaggacgctacagggtgttcggcctgggcggtggttatcaggtaatgtatttcgttaatagacgccattttcatctccctgagtgcagcgggcgccccaatgcagacactcgccctgtatggctaatttccagacctgattattttgctgttggtatctctcagcctggatgtaagtaagtggttgcttacgtcgcataacccgcgcataaagacgcaaatagtgatttttcagcagcgccagattatcgagacggtgtttatccccaccttgacgggcgacccgctcagcctgaaaaaatatctggcggatatcgcggtcatccttgagcagtgtctctttttgccacggtattcgcgccgcgtcctgcaggaagcgggttgagcgcgcttgtaatagcgttagttgttgaaaagccacggcgctaaagcggtcaggcagcgtacaggcggataaaaacaggcacagcagtagtgtgattgcgtagggcaacttcatggtgttttccataacagaccgtttgcgctatcacatgtcagagcgaggcggcacgcaaatcacaaatgctcaacacggatacaatgaggtgggatgaggaaaaatgatgccgcttcccggcgaatcggaaagcggcgtgaaggttatttgagcataggtttaaggaagcgggcggtatgcgacgcctcgcactccgccacggtttccggcgtaccggcgacgagaatttcgccgccgccgctgccgccttccgggccgaggtcgacaatccagtccgccgttttaatgacgtccaggttgtgttcgatcaccacgatggtgttgccctgatcgcgcaactgatgcagaacgtcaagcaactgctgaatatcggcaaagtgcaggccggtggttggctcgtcgagaatatacagcgtctgcccggtgccgcgcttcgacagttcgcgcgccagcttcacgcgctgggcctcgccgccggaaagcgttgtcgccgactgaccaagacggatataggtcagccctacgtccatcagcgtctgcagcttacgcgccagcgccggaaccgcatcaaagaactcacgcgcttcttcaatggtcatatccagcacttcgtggatggtcttgcctttgtacttaatctccagcgtttcccggttatagcgcttgcctttgcactggtcgcacggcacgtaaatatccggcagaaagtgcatttcgactttaatgacgccatcgccctggcacgcttcgcagcgaccgccgcgcacgttgaagctgaatcgccctggcgtgtagccgcgcgagcgagactccggcacgccagcaaaaagctcgcgaaccggggtaaagacgcccgtataggtcgccgggttggaacgcggggtgcgcccgattgggctctggtcgatatcgatcactttatcgaaatgttccagcccctgaatatcccgatacggcgccggttcggcgatagtcgccccgtttaactgacgctgggcgatggggaacagcgtgtcgttaatcagcgtcgatttaccggaacccgagacgccggtgatacaggtaaacagccctaccggtagcgtaagggtcacatctttcaggttgttgccgcgcgcgccggtgagtttgagcactttttctggatttgccggcacgcgttgtttcggcacttcaattttgcgtttaccgctcatgtactggccggtcagcgattccggtaccgccataatggcttccagcgggccttccgccaccacctcgccgccgtgaacgcccgcgccggggccaatatcaatcacatggtcggcggcgcgaatggcgtcttcatcgtgttccaccacaatcacggtattgccaagattgcgcagatgaatcagcgtacccagcagccgttcgttatcgcgctggtgcagaccgatggacggctcatccagcacatacatcacgccgactaacccggcgcctatctggctcgccagacgaatacgctgggcttcgccgccggaaagcgtctctgccgagcgggagagcgtgagatagttcaggccgacgttcaccagaaacttgaggcgatcgccgatctcttttagcactttttcggcgattttcgctcgttgcccggaaagcttgagattagtgaaaaaatccatcgcatggccaatgctcatatcagaaatagcaggcagcggcgtattttccacaaatacatggcgcgcttcgcgattcagtcgcgtgccttcacagctggcgcaggggcgattactgatgaacttcgccagctcttcgcgcaccgcgctggattccgtctctttataacggcgctccatattatgcagcacgccttcgaacggatggcggcgcacggaggtatcgccgcgatcgttcatatatttaaattcaatgttctctttgccggaaccgtacagcacgactttatgtacgttggcgctgaggcttgcccacggcgcatctacgtcgaacttatagtgttccgccagcgacttgagcatttgaaagtagtaaaaattgcgacgatcccaaccacgaatcgcgccgcctgccagcgacaggtcgggattctggatcacgcggtccggatcgaaatattgctgaacgccgaggccgtcacaggtcgggcaggcgcctgccgggttgttgaacgagaacagacgcggttccagctcgcgcatactgtagccgcaaatcggacaggcaaaattggcggagaacagaagctcctccgctttctcatcgtccatatcggcaacaaccgccgtgccgccggataattccagcgccgtttcgaacgactccgccaggcgttgggaaagatcgttgcgaactttgaagcgatcgatcaccacctcaatggtatgtttcttttgtagctccagcttcggcggatcggagagatcgcagacttcgccgtcaatacgggcgcgaatgtaaccctggcttgccagattttccagcgttttggtgtgttcgcctttacgctctttaataatcggcgcgagcagcatcagacgtttgccttccggctgtgacagcacgttatcgaccatctggctaacggtttgcgccgccagcggcacgtcatgatccggacaacgcggctcgcccacgcgggcaaacagcaggcgcaggtagtcgtggatctcggtaatagtacccaccgtagagcgcgggttgtgcgatgtcgatttctgttcaattgagatcgcgggcgatagcccctcaatatggtcgacatccggtttttccatgagcgacaaaaactgccgcgcgtaagcggagagcgattcaacgtaacgacgctgcccttcggcatacagagtgtcgaaagccagtgaggatttgcctgaacccgaaagcccggtcacgacaatcagtttgtcgcgggggatgacgaggttaatatttttgagattatgggtgcgggcgccccgaacttcgatcttatccattcacctttcccggtagagactcggatgcctggtttgtttgaaggacaaacggcagaaacggctaattatgacacaatttaacctgtttgaatatacagtattggaatgcatcttcagctaaagtatgcaacaatatgaggttcgcgcgagtgacctggaacctgcatcgcagctattaaaatgctacgtggaaatggtacactcacgcgtttacactatttatgaaacgtattcaggagactcaattatggccagcagaggcgtaaacaaggtgattctcgttggtaatctgggccaggacccggaagtacgctatatgccgagtggcggcgctgtcgccaacttaacgctggctacttctgaatcctggcgcgataagcagaccggcgaaatgaaagagcagactgaatggcaccgggtggtgatgttcggcaaactggcggaagtggccggcgaatatctgcgtaaaggttctcaggtgtatatcgaaggtcaattgcgtacccgcaagtggaccgatcagagtggccaggaacgctatacgactgaaattaacgttccgcagatcggcggcgtgatgcagatgctgggtggtcgccagggcggcggcgcaccggcaggcggtcagcagcaggggggttggggtcagccgcaacaacctcagcagccgcagggcggcaaccagttcagcggcggcgcgcagtcgcgtccacagcaatccgcgccagcgccgtctaacgaaccgccaatggattttgacgacgacattccgttctgatttttggtaaaaaactcaaagcgttatttgcattttcgctatagttctcgtctgctgaaatgcctggtgtaaaccaggcattttcttacctggtattattgtctttgtatccctttcaaaaaagagaagcgcatatcttacggaaaaatgtcgcttatcgcctctggccgactcgcctcggcacatcattatccagccgaagttcataaatgtactgcaataacccggattgtcttaaatatgaaagagaaatctcatctgcaaaatatataatttatagccattttttgacaacaaaaagatattataaaataacggtagagaatggtcggtattatcaatggttaattaaatgtttgctttagcttgtgatgagctcaaatatgatatgtgtatcttgctttatttttaattgctgaagataaaattgttacttatagctggctttatataaaaaatggttttatttgtgtatttttttacacaattctgattttttactccccacttattatattttcaatgatttaagttatattgaagtccatatgaccctatgttttaattgtgaaaattaattttatcctctggaggcaaatttattaaatacgtatggttataacgcgtattaaaaagaaatatgtccttaaaatgatttagagtttcaatgattagctaacaaatctatttatcggcgggtggttttaatttgctgatgactattttttatttatgagttgagagcttatgcgatacctattattggggaggatatagttagtgcaataattgatgtctacctaattaaaaaaatgaagagtgtttttaattaaagcactcatctttgttgtgggcgcataaaaatggcgtcgttgtttttatttttctgattacgagatgtaagaaaactgaaatctataaagcgtattggtagcaggaagccaagggcggtagcgttcactttctgaataagttgagcatcctttatcctttctaatccacaaaaacattttattcacaatgtaatatcaggagacaacatggaagacgaaagtaatccgtggcctagttttgttgatacattctctacggtattgtgcatttttatatttcttatgttggtgtttgcacttaataatatgattattatgtatgacaactcaattaaagtttataaagcaaatatagagaataagactaaatctactgctcaaaatagcggagccaatgacgattcaaatcctaatgaaatagttaataaggaagtgaatactcaagatgtgtcggacggaatgactacaatgtcaggtaaggaggttggagtatacgatatcgccgatggtcagaaaactgatataacgtctacaaaaaatgagcttgttattacgtatcatggcaggctgagaagcttttcagaagaggacacttataaaataaaggcttggttagaagacaaaatcaatagtaatttattgatagaaatggttattcctcaggcagacatctctttctctgactctctacgactgggatatgaacggggaattattttgatgaaagagattaagaaaatatatcctgatgtagttattgacatgagtgttaactccgcagcatcaagtacaacgagtaaagctattatcacgactattaataaaaaggtgtcagagtgaaatatataaatcattaccgctatttgtttgtctgttttttccttgccatactccctttttttgctttatcttttcccggtataagagagtatgtttttgataacttcatggtttctgcaatttacaatggagtcattattgccatttatattacaggttctttgtgtgcattattcactattcttaaaaatatttcagcaaaagacatattaatagctcaggacgccagtagaaaaaatagcattctttctaacctcaatcaggttttgtttgccggggagtccaaacagtgtgatttcaatttactgatggaattagatgacaatgtgtctaccgcccgtaatcaacgattgtcatttattatgagctgtagcaatgtgtcgacgcttgttggcctgttggggacgtttgcgggtctgtctattacgattggttcaatcgggaacttattgagctcgccatcagatgttggcggtgataatgcaagtaatacactcaatatgatcgtgacaatggtagcgtcgctttctgaaccattgaaagggatgaataccgcatttgtatcttctatctatggtgttgtttgcgccatactcctgacctcacaaagtgtttttgttcgcagctcctattcccttgtttctacggaaatcaaaaaattaaaaatcataagcaacagagccaataataaacagcgaagcctgcgggttgaatcagagacgcttgtagaatttaaagagttgtttaaagcgttttttgataactacctgacagttgaaaacttacggacgcaggatgaagaaaagaaacgagagatgctatcagatagctttgtcactttgcaaaaccgactattggataactcagcaaaactggaacaaatttctacgctgattgatggttatctggtaagcagtaacgaaaatctcaaaaaattatctgacggtgtaataacaattacctctcgtttatctgaaggtaatatcctgcttgctgataataatgcacgactggaggcaatgagtacaatacaaaatattatagataaaaagaatgattcaataatgacatcagttgataaatgttatcaggaatctctttcacatggtaagaccataaacgatattgccgctggcagtgccgatatttctcatactctcgatgggctgagaaaagaaatggatgaggatatgaataatgttcatttagcgctatccgatctatcggctactgataaaaagattattgccaatactaaagagattagtgctgaaatggttagctaccgtgatacctatatgccattaatggaaaaaataacatctatgcatcaggaaatagtaaagcaacgtttgttaaacaaggaggaaaaaaatgaagattaagatgttttttctgacgactgcttttattacacaaagcacatacgccagcgagcttccggtcattcctctaagagatttagttaatgccgcattaacgcatcagccctctgttgctgtttcatattatgagactgaaaagaaaaacagtgacttagatctttcacgggcagcactttatcctaccctggatctaacatctggccttaataataacaggaaagagtcatcaggtaccgagaggaacgttgaaaataaggtgtctttatcataccgaataacggattttggagtgaggggggctaatatcaggaaatctgaatatgaaagagataatagtaaaactgactatgaaaaaacaaagaatatagtgtctcaggaggttgtgacaacctattacaacatcagtaaatatcgtgaaatgattgatggcgtaaatctggagaaagagttttataaaaagatgctggaaactttttcgttgctggtatcttccggtgtagctatgcaatctgatatgcgtaaagtacaagtatctatcgatgcattaaataccagaagcattatgtatcagtcgatgttggatgatgaaatgtataaaatgcagaatatgactggtctgaatttatcgccagttcagattcaaagcgatgaaaaattcaacctcttcaaaaaatatatctttgtcgaaagccctgaaaaacttatggacatggtgatgaaatacaacgatgactataagatgcttgtcaatacccgaaaagccgcgaccgaagatattaatgccgcaaaatcatcctattttccgactgtagatcttgtttccagctatgtacagaataacccgagcggtagtgccaaaaaaagtgattatgaagatgaatttaaaacgggtatcaatgtcagtttcaacatttttaatgggttcagaaattcagcccaggaaagaaaaatggtggcaagttactcgcaggctaagctgcaaattgacgattttttgattaaaacgcgttataacattgattcacaactttcaagatacgccgctgcaaaagagacttactcagtggcggaacgttcacatacaaacgcgttacagcttactgaattatatgagcaggagtttcagttagggcaaaaaagtttgcttgatttaatttcaagccgtaatgaagcatttcaggcatatgtaagcatgatcgacagcaaatatagcctgtatattttaaagctacagcaactctcattgatttttcatttaatggattatttaaaaggaaatactgaaagtgagttaaatgtaatgaaatgaatagaagacaaagcgatcatctcatgatgataattatttctttgacgatcttaattattatccttacctactttatagaaattaattcagtggttcatggtcagggcgttatcactactaaagataatgctcagttaatatctctttctaaaggagggacgatacaagatatttatgtagccgagggtgatactgtaaaaaaaggagaactccttgcaaaggtcgttaaccttgatctgcaaaaagaatatcaaaggtatagaactcaaaaagggtatctggataaagatgttaacgaaatatctttcattcttgataaagaaaatgagagtgggttgattaccctggatggcacccgttctttaagcaataaagaggtaaaagcgaatattgaattagtgcatagtcagataagagctaaagagttaaaaaaaacctctcttgattctgagattagcggattacaagagaagctgagttcgaaagaaaaagaactcgcattgcttgccgaagaaataaatattctttccccactggtaaaaaaaggaattagcccatataccaattttcttaacaagaaacaggcgtatataaaagttaagtctgaaattaatgatattgaaagtagcatcactttaaaaaaagatgatattgagttggttgttaatgatattgaggcgcttaataatgaattgcgactatctttatctaaaataatatctaaaaatcttcaggaacttgaggttgttaactctacattaaaagtaatagagaagcagataaatgaggaggatatctattcaccggttgacggtgtaatttataaaatcaataaaagtgccactactcatggtggtgtgattcaggcggcggacttactttttgaaataaaaccaaaagtaaggactatgctggccgatgtgaaaatattacccaaataccgtgaccaaatatatgtagatgaagccgttaaactggatgtgcagtcaattatccaaccaaagataaaatcgtataatgcgactatcgataatattagccctgattcctatgaggaaaataccggaggaacaattcagcgttattataaagtaattattgcattcgatgttaatgaagatgatttacggtggttaaaaccaggtatgactgttgacgccagtgtaattaccggaaaacacagcattatggaatacctgttatctcccttgatgaaaggcgtggacaaagccttttcagaaccagttaatactaaacgattagatacaccttgagagtgaatataatattatgggaaataaaagcatacaaaagttttttgccgatcaaaattctgtaattgatttatcttctttgggtaatgccaaaggcgcaaaagtttctctttccgggccagacatgaacattaccacgccgcgtggttcagtgatcattgtcaatggcgctctttattcaagtatcaaaggcaataacctcgctgttaaatttaaagataagactattaccggcgctaaaattctgggcagcgtagatttaaaagatattcaactggagagaattgacagctcattggttgattctgctcaggtagaaaagaaaggtaatggcaaacgacgaaataagaaggaagaagaggaattaaaaaagcagcttgacgatgctgaaaacgcaaagaaagaagctgataaggcgaaggaagaagcagagaaagctaaggaggctgcagaaaaagcgctcaatgaagcgtttgaagtacagaactcgtcaaagcaaattgaagaaatgctgcagaactttttggctgacaatgtagcaaaagacaatctggctcagcaaagcgatgcttcccagcaaaatacacaggctaaagcaacgcaggcttctaaacagaacgatgctgaaaaagttcttcctcaacctattaataaaaataccagtactggcaaaagtaatagcagtaaaaatgaggaaaataagctcgatgccgagtctgttaaagagccgcttaaagtcacattagcgcttgcggccgagagtaacagcggtagcaaagatgatagtataactaattttaccaaacctcagtttgtaggtagcactgctcccaatgccacggttattattaaaattaatggtattgctgtcggtcaggctgtagcggatagtttgggtaacttcacctttacagcgcctgaaacattgactgatggaacatataatctggaggcagaggccaagactgctgatgggagcggtagcgccaaacttgtcattactatcgattccgttaccgataaaccaacatttgaactttcgcctgaaagtagtgtgtccggtcataagggcttaacgccgaccttgacgccttcaattgttggtacggcggaagagaatgctaaggttgacatttatgtagataataaactggttgccagcgttgatgtcgataaagatggaaactggagttatgaatttaaggataatgaattatctgagggcgaaaatagtataaaagtcgttgctgtagataaagcaggtaataaaaacgaaacgacggatagtatcataaccgacaccattgctccagaaaagccgacgattgagctggatgatagtagtgattccggcattaaaaatgacaacattacaaatagcaccctgccaacatttattggtgtggcggaacccggttctacagtctctatttatcttggacttaaacatcttggtgaggtcattgttgctaaagatgggacatggagctatacgcttactacgccgctcaaggatggcgaatacaatataacagcaacagctactgatattgccgggcatacctcagcgacggcaaatctgccttttactattgatacacgtatcagctatttcagcgctgagattgaaacgacgaatgatagcggtattgtcggagataacgttactaacaatactcgcccaacctttacaggtaaaactgagccaaatgctattatcagtgtcataaatagtgagactggcgaagaggttatttttaaagcgaatgacaagggcgaatggacgttcaatttcacttccgactcagtggaagggattaacaatcttacgttcactgttgaagatgtcgctggcaacaaaaaggatttttcctttagttacgttattgatactattgcccctgtacctccgacggtttctttggaggattatgttgttttgccgaatggtataattttatcagggaatgatttaccggctttagtcggtacggcagagccaaagtctaccatcttattgatgcgagatggtaaattatatgacagcattgaggttgactcaaacgggacctggaattatcagtttagtaataaatttcttcagggcgcctatgatattgaaatcatttctcaggatgccgccggcaataaatcctctactgttaaatattcttttactattcaaactgaagttgtacctccaaaagcggaactcgatgccagtgatgattccggtgcaaaaggcgactggattaccaataaacataatgctctgacattactgggaacagcggataggtttgctaccgtaaatatccttattgacggtaaaacgataggcgtgacgactgcggatgcagacggtaactggaattttgatatttccagaaatctgtctgacaatgtttataagattacggttgaatccatcgatcctttaggaagaacgtcatctgtagattatcagcttaccattgatagctttacgccgatccctactgttatgttgcatgatagcgctgactctggcgttaaaggcgatatgattactaaaattaatacaccgttgtttaccgggatggctgaagctaatgctaaggtttccatctatgttgacggtgtgttaagtggtgaggctattgctggcgatgatggtgtatggaattttcaatttaccacagcgttatccgatggctcgcatgacgtaacggtaaaggtagaagatattgccggtaatactgcctcctcatcagcgtataatttccaaatcgtaacgcaaacgcaaaaaccaacaatagagttggtcaacgatacgggggttgataatacagaccatattattaatgaaaagaatcctgcactgacaggaaccgctgcaccctattcaacggttaaactctatattgatggtgcactgatcgctgaggtcagaacaaataaagatggcagatgggagtataccctgaaagccgatcaaggtttggttgatggcgatcatagaataaccgcttcagttgaagatatcgctggcaacattgctcattcggatcctttcttaattagcgtcgatactgctatttcaataccgatagtttcattgagcccggattcagattcgggaatttcagatgataatttaacgaatatcgttaaacctaccttgcacctaaaagatattgatccggacattatcagtgttcaggtatgggatgccatgtctgatacgcagatcggtgttgccacgcaacaacctgatggttcatgggcctatacctttacttcagatttaacggaaggcttgcatcaggtttatgtcaaggttgaggacattgcgggtaataaagcgaacagcgcgatattcgattttactatcgataccacagtatcaacgccggtgatttccctgctttctaaggatgatacgggggttacaggcgataacctgaccaatatcaataagccaggttttgctatttccggtgttgatgccgatgcgcatcgggtcgtcgtacaggtgatgcacaatggcgtgagcgaagagatcgaactttcccacctcaatggtagttggttatttataccagggaatacgtgggcggatggcagctacacgttaacggtgaaagtagaagataaggcaggaaataccaactactcagcgccgctgacggtcgttatcgatacccaaatcgccattgatggggtggaactggtcaacgatagcggcgtgaaaggcgataatatgaccaacgacgaccgtccccactttcgtgtgacggtacctacggatgtcaatgaagtccgtctgagcattgacggtggtaattcgtgggttcaggcaactccgggcgtggcaggaagctgggagtatatctggccgacagacctggcagatggtcaatacacgctaacggtggaagcgactgataaagcaggcaatacagtgacgaagaccatcgatttcgcggtggataccacgctgtcagtgccggtcatcgtactggatagcgcggacgacaccggcatccagggcgataacatgacgaatagcacccagccgacatttgccctgcagcatattgatgatgatgccgttcgcgttacggtcagcgtggagcatggcggcgtcaccaccacatttgacgccacgaaaggcacaggcggatggacctttacgccgccgacatcatgggcggatggtgattataccctgagtgtgtcagtcgaagataaagcggggaacaccagccattctgcatcgctgacggtgacggtggacacgcaaatcgccattaataacattgaactggtcaatgacagcggtattcccgacgataatctgactaataatgtgcgtccgcacttccaggtgacggtaccgacggatgtcaacgtggtgcgcctgagcattgacggcggcaagacgtggttcaacgctacccagagcgcgacgccaggcgtctgggattatatctggccggatgatgtggccgacggaggctataccctgacggtagaagcgaccgatgaggcgggaaataaggcaacacagacgctcgatttcaccatcgataccactctgtctgtgccgaccctctcgctggacagcgcagatgacagcggcatcgcgggcgataatatcaccaatgttaaaacgccgggctttaccctcaacaatattgataccgatgtcagccgggtgatagtggaggtaatgcacaatggcattaaacaggaggtgccactggttcagaccggcggacagtggcgctttgcgccgaccagcgactgggcggacggcgactatatcctgacggtgaaggtagaagatagggccggaaatgtgaagcagtccgcgccgttgacggtgacagtagacacgcatatcgccattgaccgtattgaactggttaacgacagcggtatccccggcgataatctgaccaatgaagcgcgcccgcactttcaggtgacagtaccggcggatgttaacggtgtaagactgagtattgatggcggcaaaacgtggtttgacgccacgcagagcgcgacgtcgggcgtctgggattacacctggctgacgaatgtggctaacggccctcacaccctgatggtggaagcgtccgacaaggcgggaaacaaaacgacgcagaaactggacttcaccatcgataccattctgtcagaaccgacgattaccctggacagcgcggatgatagcgccgctggcgataacatcaccaacgttaagatgccaggctttaccctcggtaatatcgacgccgacgtgaccaaagtggtggtgacggtggcgcatgatggtaagaaccaacagatagagttgattaagaacggcggtgtgtggcgctttacgccgggcgcagcctggaccgatggcgactatacgttgacggtaaaggtagaagataaggcgggtaatacaaattattctgcgccgctgacggtgactatcgatacgcaaacgtctattgatcgcattgagcttcttaatgacacgggtattgtcggggataacctgaccaatgaagcacgtccacagtttcatattacggtaccgacggacgtgaactctgtgcaactgagtcttgatggcggcatcaactgggttaacgcaacgctgacgtctgacggcgtttgggagtatatatggccgacagatctggtcgaaaatacgtataccctgacagtgaaagcaaccgatgttgcaggcaacacggcgacggaaacgctcaattttatcattgataccacattgtcgacaccgaccatcacgctggatagcgcagatgatagcggcaccgccaacgataataagactaacgttaaaacgccgggttttattatcggcggtattgattctgacgtgactcaggtcgtcgtgcaggtgatgcgcgatggtcacagcgaggaggtggagctgacgcagactaacgggcagtggcgttttgtacccggcagcgcgtggactgatggcgactatacgctgacggtaacggtgaaagatgaggcgggtaatattcgccactcagcgccgttgacggtcaccatcgatacgcaaatcaccattgaccatattgaactggtcaatgacagcggtattcccgacgataatctgactaataatgtgcgtccgcacttccaggtgacggtaccgacggatgtcaacgtggtgcgcctgagcattgacggcggtaagacgtggttcaacgctacccagagcgcgacgccgggcgtctgggattatacctggctggctgatgtgggagagggtaagcataccctgacagtggaggcgaccgacaaggcgggaaacaaaacgacgcagcaactggacttcatcatcgataccctactgtcagaaccgactatcgtgctggacagcacggacgacagcggaacaaaaggcgatcacctgaccaacgtaaataagccgacgtttttactgggcaatattgacgcagacgcgcggtatgtcacggttgaggtacagcatggcggcacgaaagaggtgctgacggccaccaaagacgcgaccggcaactggagcgtgacaccgaccggcacatgggcagatggcgactatacgctgacagtgagggtggaagatgaggcggggaacgaaaaacactcagcgtcgctgacggtcactgttgatacccaaatcaccattgatgttattgaactggttaatgataacggtattcccggcgacaatatgactaacgacgcccatccgcagttccgcgtgacggtaccgggggacgttaacgaagtcagtctgagcattgacggtggcgtgacctgggttaaggcgacacagagcgcgacgccgggcgtctggaattatacctggccgggcaccgtgccggatggcgactatacgctgaatgtgaaagcgactgacaatgcgggtaatacggtgacggagacactccacttcactattgatactacgttgtcgacgccggtgatcgtactggatagcgcggacgacagtggtgtccatggcgataacatgaccaatcacacccagccgacatttgccctgcagcatattgatgatgatgccgttcgcgttacggtcagcgtagagcatggcggcgtcaccaccacatttgacgccacgaaagacgcaggcggatggacctttacgccgacaggggcgtgggcggatggtgattataccctgagtgtgtcagtcgaagataaagcggggaacaccagccattctgcatcgctgacggtgacggtggacacgcaaatcgccattaataacattgaactggtcaatgacagcggtattcccgacgataatctgactaataacgtgcgtccgcacttccaggtgacggtaccgactgatgtcaacgtggtgcgcctgagcattgacggcggcaagacgtggttcaacgcgacccagagcgcgacgccgggtgtctgggattatacctggctggctgatgtgggagaggggaagcataccctgacagtggaggcgaccgacaaggcgggaaacaaaacgacgcagcaactggacttcatcatcgataccctactgtcagaaccgactatcgtgctggacaacacggacgacagcggaacaaaaggcgataacctgaccaacgtaaataagccgacgtttttactgggcaatattgacgcagacgcgcggtatgtcacggttgaggtgcaacatggcggcacgaaagaagtgctgacggccaccaaaggcgcgaccggcatctggagcgtgacaccgaccggcacatgggcagatggcgactatacgctgacggtgagggtggaggatgatgcggggaacgtaaaatactcagcgccgctgacggtcacggttgacacccaaatcaccatcgatgttattgaactggttaatgataacggtattcccggcgacaacctgaccaatgacgttcgtccacacttccgcgtcacggtgccaggggatgtcaacgaggtacgtctgagtatcgacggcggtaatacgtgggttcgtgcaacacagggcacggcagggatctgggattacacctggccgaaagatgtgaccgacgggctacataccctgacggtagaagcgaccgataaggcgggaaataagacgacgcagacgctcgattttaccattgatacccggctgtcaacgcctaccatcgctatggatagcagggacgatacaggtgccattggcgatcatattacgagcgtcaaaagaccgggctttactattggcaatattgacgccgatgcgcactcggtcattttgcggatcacacagggcggcaatagccaggaagtgacactaacccaggttggaggacagtggcgctttacgccagatgctgactgggcggacggtagctatacgctgacggtagaggtaacggataacgcaggaaacgttcgtcagtccacgccgctggtggtgacggtggacacgcaaaccagcattactgatattacattggtcaatgatcatggcgtgcctgatgacaatctaactaatagcacccgtccgcagtttgagatcacggtgccggcggatgtgaattctgtgcaactgagcattgatgggggcgcaaactgggtgagcgcgacgcagggtatcgaaggcgtctggggctatacctggccaacggatatgggcgatggaaaacacaccctaaccgtcatggtcaccgacagagcgggcaatacggcgacgcaaacgcttgaatttttcatcgacacccggttgtcgacgccgaccattgcgctggatagcacggatgataccggtacgcctggcgatgatatgaccaatcgcacccgaccgacctttattctgcagaatatcgattcggatgttatcaacgttacagtcagcgtcacgcataatggaacgacaacctcgtttactgcgacacagggggctggaggatggagctttacaccgccagcgccgtggggcgacggtgattatacgctgacggtgacagtggaggatcgggcgggaaatacgcgtccgtctacgccgctgacggtgacagtggatacgcaaatagccattgatcgtattgaattagtcaacgatagcggcgtccctggcgataatgtgacaaaacatgtgcgtccgcagttccagatctcggtaccggatgatgtggaaaaggttcttctgagtattgacggcggcacgacctgggttactgcaatcaagagttcgacggctggcatttgggattacacctggccgacggatatgccagagggacagcataccctgaccgtggaagtgactgacggtgcgggtaataagatgacggagacgctcaatttcactatcgatatcacgttgttaacgccaaccattgagctagcgcccgatcaggataccggacagaataagaacgataatctgaccagcgtcactcagccggtatttgtgttggggagtatcgataaagatgttcgacacgtggaattgagtattgagcataacggcacgtttaaaacggtggtactcaccgaatcagccgacggctggcgctatcgaccggattctgctttggcggacggtagctacacattcaccgtgacggtaacagatgtggcaggcaaccagcaaacatccgcgcctttaaaggtgacgatagacggtacgttgactacgccggtgattgaactggcagctggcgaagatagcggtactgttggcgatcgcctcaccaatcacgatcggcctgtgttcgacatacatcaggttgattctgacgttacgcgcgtgatggtcaaagtaacttacaacggtaaaacgcacgaggaagcggcggtattcaccaatggtcaatggcgctttacgccttctgcgagctgggctgatggctcatatcagttagccgttgtggtggaagatctggcggggaatgtaaaagagtctgcgccgtttgaggtgcgtattgataccacgacaaccattaacaatatcgtattgcttaatgataccggcgtgcagaatgatcaattaacgaatgttgccaaaccgtcattcagaattgacgttcccggtgatgtcgtccaggtacgtgtaaccctggatggtggcgctaactggaatgtgatacgcaaaaatgccgacggacagtggatttttgacagcccgaatactctggttgacggcacatatacccttcgcgtagaggccacggatgaggcaggtaatattgcgaataaagatttagtatttaatatcgatactaatatacaggttcctactattgctttagacgcaggacaagataccggagcgaataccgccgataatattactaatatttcacgacccacctttacgattggtaatgttgaccccgatgttatcaaagtcgtggtgacgattgatggtcatgattataacgcgactaaggttggggctggttggcaatttacaccaggcaatgccattccggatggttcttataatattaccgttacggttgaagataaggccggaaataccgcgacatcgaaaccattacctgttgtgatagatacgacggctgaaattgaaagcgtcacgttggttacagatagcggtgatagcgatgtagataacattaccaaagtcgacaagccgcagtttagtattgttaccgctgatgatattacccatgtgcgcgttaaaatcgataacgccgctaattggattgaactcacaaaaggaggggatggccgctggatatttaatgtcggttcggcattacctgatgggcaacacactctcttggttgatgtgactgatatcgccggcaacgttgcgcaagaaacgctgcagtttacgattgatacgactctgcgagagccgacaattgtactcgatcccacccatgatactggtgatgatactaatgataatcttaccaggattaacaaaccggtgtttattatcggtaatgtcgataatgatgtatcacacattgtggttcatattgatggtcgggattacaccattgaaaacacaggggggaatttaacctttacgccggatcaaccgctgtctgacggtcagcatacgatctctgttaccgtaacggatattgctggtaataccaaaacatcggccgaactgcggattgaaatcgacacgcaggttcagattgacagtgttacgttaacaacagatagcggcgtcaacgatcacgataatgtcaccaatgctacccgtccctcttttgaaattgcaacgcctgatgatgtgacatcggtgctggtttctttcgatggcgtaaactggacgcccatcagtaaaaatgcggccgggcagtgggaatttactgcaggtagcgcattgcctgatggtcattatactctccatgtccaggcgacggatcgggcagggaatacggcaaattccacgctgggcttcaccgtggatacgcagattgacggcctgagcgtcgtgatgctggacgacgccggaaaggattctacggatggtattacgaatattacctctccacgttttgaaatttcagccagagaaccgctgcagagcgtgacggtaattttaaacgggaaatccagcacactgactcagggggcaggtaataaatggctgtttacccctgatacaccgttagtggatggaacttacaaaatagaaatagtggctgaagatatcgcaggtaataaaattagcaaagaggtatcattcacaatagacactattgtttctgatcccagtattgatttgctggatgcggatgatactggcgaaagcgctgttgataatattacgagtgtcactacaccacgtttcgttattggcaatgtacccgccgatattgatactgttgtaatcagaattaacggcgtttcttatccggttacggcaaatggcaataacctctgggaatttcaggttcccgttgcgttaaacgatggcgtatatgaagccgttgttgtcttcagagatattgccggaaatacttctgaaactaagctgccctttaccattgataccacgacaagcgtcagtgtcagaatggagccagcgtctgataccggaaattccaatagcgataaccttacgaataagcaaaatcccaaattcgaaggtactgcagagcccaatgcgaaactggtgattaccattgttgacgataagtcaggtcgggaggttttaaaacaaacgattacggttggcgctgatggcaactggagtgtgacgccgaatatactgccggatggcatgtataccatcaacgtcgtcgcaacagatgtcgcgggaaatactgcgcaaacgcaggaaagattcactatcgatacggttacgatcgatcccaccattcgcctttcggatccatctattgatgatcagcatgaagcaaccagcctgcgtcctgagttcaaagggtttgccgaagcgttctcgacgattatgattcagtgggatgggaaagtggtcggctcggcaaacgccaatgcgaatggcgaatggagttggacgccgccatcagtattagcgccaggctcctatgttgtgagcattgttgccaaagataaagcgggtaatgaatcgtcgcaggtcgactttcctgtcgtaatacctgttattgatgtcacgcctccaaccataaagctcagcgaggagagcgatagtggcgccttaggagactttaccacgaataataaaacgccgaccctgattgggagcacgttacctaatacgattgtgagtatttatgtggatggcgtgaaggtcggcgaggcgacagcggatacagcgggtcgatatactttccagttatcggaaatgaaagatggccattatgtcgtccaggtgggtatcgtcaaccctcgcgataatagcgaactgcgttctaccgccgttgatgtcactatcgataccgaggttgctgaactggtatggaatatatctggaatgcatgagggcggatatatcaatacggtgacgccggagattggcggcaccagtgagccaaacagcaaaatcactatctttgtgaatggcgttgaaaaagcgattgcttatacgacaggcgcaggacactggggcgtagtattacccgctttgggtaatgacggtaattatgaattaacgtttaaagttgaagacgttgccggtaatatcagagagtttggtccgcagaatgtaatactggatacagtaatttcgccgttaaccgtggtattacgcgaagctgatgacagtggcaaagttggcgactggatcaccaataaatctcatgtcaccatcgatggtactgccgaagccggaagtactttaaccatcaggaatccgcagggagtggttattgctaccctggtggtaggcaatgatggtcgatggagcgcagaattagatctgcgtgaaggtagtaatgcctttgtcgtggtatcggaagataaagcgggcaacagtcaacaaaaagagattctgatagaacatgatacgcagattgaaatcagcgatatttcattaagtcgggatactaatagcggtgataaatatgatctgattaccaataataagtctccggtactggttgccatgaccgatcccggcgcgacggtacaggtttatattaatggtgtgttacaaggcacagtagaggcgagttcgtcaggtaatattagctataccatgccggcaaatagcgccgacggcgagtatcaggtgcaatttgttgctacggatactgctggtaaccgggttgagtctgcgattacaaccgtgacaatcgattctcaaattgctgtctttgatattgatgaagattcattaccggccctctctaataaccgagcgttgtcagtctcaggtgtcggggaggctggttctcaggtcagcatctttgtcgatggtaaattagtcaacgttgttatggttgaggctgatggcacatggcgcgcgccgatactgctgcaagatgatggtacgtttaatattcatttcagcattactgacgttgctggcaacactgaagtgagcaaggattatagcgtggatgtcgattcatcaaccgacttcccaacgctcaaccttgaagatgcaagcaactctggttcacttgacgatctgattactaatcacaacaagcctgtattagttggcaccgcagaagcgggagccacaatccatatttatgtggatgaaaagatcgtggcaaatgttcttgtgcttgaagatggaacctggtcctatcagtttgataatgcgttaaaagatggtgaatattctatccgtgtggttgccgaagacccggcaggtaatacggcagaatcgcctcgcttactcgtcacgatagataccagtacgtttatcgataatcctgctatggtggcaggttctgataatggtattttcagtaatgatagtataacgagtcagacccggcctacgtttagtatttttggagaaatgaaccagagtgttcagattttcattgatggagtgctagtcgatacgatcacggtgaccgacagaaatcaagtttatcgacctgagtcaccgttgggcgatggttcccatagcatttattatgttatcaccgataaagcaggcaacacggctacctcgaaaacgctaaactttactatcgatacctttaatacgacgcctgtcgccattgattctatcggtggacaaacgttagcagagatgaccggtagtgatggcaaaatatatataacggacacgacgcgtaacttattgtttagtggcagtgccgagcccaatagcaaaatagaaatcatcattaatggcttaaatgtgggggaagtttgggttaatgaaaaaggccactggcagatgccggtgaacccgctttatttcacagaaggccaactggatatcactgttaaatctacggaccgtgctggtaacgtaaatcaggaaaagtattccatttgggttgatacgcatatcaaggtatttaccagcgagcttgatgacaataaatcatcatcgaaaacggaatggtggagtaatagcgatctcattaccatgcgaggcacgggtgaaattggcgctacggtatcattaatcgtggctggcgtcacgctggcaactgctgttgtggcggcaacaggacgatgggaattatcaacagacaagcttccagaagggacttacgatattagtttggtcattgaagatagcgccggaaatcgttgggaagatgtgcgtgaaatatttattgaccgaacgccgccaaatgctccggtcgtaacgtattcagatattgtcaacgatctaattattatgcaggggacggcggaagccaaatctcagctaataataaccgatagtgaggggaatacttatacgttaaccgttcctgataatggtaaatggagtatggctatcccgtatccatcagaagggaagtttaccattacgagtgtggatgctattggtaaccggagtgatgatgtccctctcgatatcatgaaagaggttcccgttatttcattatctccagactcagacagtggtacggtgggcgataatattacgcgagataagcaacctacctttattatcgggaatctggaaagcgatgttgtggtcgttcaggtcgatatcaatgggaccgtatataatgctgaaaaaaatgccgatggcgtttggttctttacgccaggtacaccgttagctgatggttcctatacgatatcggtaatcgcaagcgatgccgcgggtaatcagaaaaactcgttacccattactgtcacgatcgacagcacgctgacggtgccggagattgcgttggcagcaggtgaagacaatggcgcttcagacagcgataacgtgacgaatcacacccagcctaagttcacgctgcagcatattgatgctgatgtgaccggggtgaccgtaaacgtgacgcataatggcgtgacagacatctatcaggcgacgcaaggcgcggatggctggaccttcacgccgccagccgcctggaatgacggtaactacacgctgagcgtgacggtggtggatcgcgcggggaattcacagcaatctgcttcgctagcggtgacggttgactcaacggtgacggtaacagcggatagccagcatgacgatgcgagcgatgacgccacggcaacagcggttactccaccggagtctgaaacagtgaatgccgaaagcgctacgcatcttcgtacagagccgtctgcggcggaagaaagcgtggtgaaggtgacagcctatagtattacattgttaaacgctgactctggggatgaaatagatcgttcaattagtcagacaccttcttttgaaatatcagtacctgagaatattgttaatgtcagtattatgtttgaaggagaagagtttactctgccgataactaaccagaaagcaatattcgaagttccgctatctttggaagatggtgaatatactatggacgtgaaattcattgataaagacaatgatttcctgattaaggagaaaacattctcagtcgatcactcctcggcggatattgtgaacgcaatgaatgtaagaggaaagaccgaggatgatattaatgattccccttccacgagttctgtagggcacaacaataacggcgctattgatgttttcgccgttaatgaagttacgctacctgtagataatcaagaagaacacgcataataacggaggcccctcacctttgggtgagggggtttacttatggataaaaaactagaaccttattatttaagtgcggaaacggcattatctatagtgtctaaaaaattcaacataaaaattgacatcaaagaggatgatataaatttaagatttaaaaagtacgacagaaataacactgacgactctatacaaatgaagaatttctttttgtcgttagggctttctctacaggatatattatttaataatggtgaggatttactaaatgagcctatgccgattttactattaacaccagaaatgaagtggatggtgtgtgtgagtggcgggcaaaaaataaagttggtaaacgcgcgcggtgaactctgttatgttgaaattgaagatgaatatttaaaagagttatctgcatttagtatactacctttaaataaagttgttgatagtataagagtaaaaaatatcataaaaaactctttatcgatgaacaagattttttatactaaatactttttttcatctctttttatggcaatttttgcgttaactatcccagtatttagtaatctgttctatgataagcttgttccaagcgcttcggtttcatctttatttggcgtggctataattgttgctgtatttattgtttttgagtttatccttcgtacttcgaaagatatttatcagtctatcacagcaaggcaggatgacgtcgatattgatatcgcatttcttgaagcggtactttatagtaaaaagaaaaatggcagatccatgtcatcagcatttgtgctatggaatgagtttcagaaaattaaacccgttttattaaactcgatctttcaacgtatagccgatattccaatatttattatatttctcattgttatatatgtaaatttaggtctggttgttattgtacctattaccatgtttatcgtctctattattatttccctcgttaaccaccattatactaatgagttaatgaacaaacaaaaagaaggacagaagaacaggaatatttttatctcagaagttttcttatctattaaaatgatccataccttaaataatcaaggtttactttttgattgggttaatacatcaaatgaacagtcgtatcttaacctgaagataaggaaattaaatcttatctatcaatctatattggggagtatgtcatctattacccaaataactattatggtaatagccttttttatggtaatcaagggtgatgttactactggcgcaattgtttcatctgtcattgtctctggccgtatttccgggatcatttcgaatttttcttctacattaatctctattttatcagcagaaaaaaccggtaaggatctgctttctttttttgatgaagatcaggcagaaaaaacaccggcattacagtcaatatcaaagtgcaatggcgatatctctatccggggcgtgagttatcagtatgatgctcaatctccgatgattattaaccgactgtctatagacatacctgcggggcaacgtgtcgcggtggtaggcgaatgcggagcaggaaaaagctcattactgggaatgctatctggctacctttcgccaacagacggtgccattttatatgatggatataacttaggacatttatcgcagaactttttttctcagcatttaagcgtggtgacgacacatgatgttttattcaccggaaccattgaaagtaatttcgcgttaaaaccgcaaaacgacaggggccgggtactcaaggcgcttcagctggcgaactgtggttttatcttgcaacatcctatggggctgaagtttccggtgaattttatggctaaaaacctgtcatccggacagcagcagcagttattattagcacgtagtctgagtagtgacgccagcgtctttttatgggatgaaccaacatcaaatctggatgagaataccgagaagcaaatttttgataacttagatgagtttattcatgggaaaacgttgatcatggtgacgcatcgtcgatatctgataaagtattttgaccgggtcctggtaatgaaaggtggaaaaataatccgtgattgttctccggataaattattaatgtaaaataagcagcgcttgtcgctgttatcaggtggtactgcttaataaaaaagacccgttgcacaaacgggtcttttttgtcatttaacgagtcggcaacgtcttcaataagtttagctcgattctgttagggctattccacttgccatttttggataaccacacctggcggccctcatcaacggcaatgcgagggacgtgatggtgcgcaaggctacccctggcgcgcgattccgcgttgagataaccggtgggcggcttcagcggcagcgatagcgtatcaggtcagcaccatcggccattctggcggggtctggctcatcgtttcgaccattacggcttcaatgttatgccagatcgcagcgagatccatcatggtaataccgagtaaaccggtggcaaaccagcaggcggataccacgcccagaccgctactgatcaccgccagaccaatataatctgatttacggaaacggatattgagcgtgctggctaaaaacatgagcacggcgctcagcagttgccagcggagaagaacgacaccagtggttatggcagccatgaaacatttcctctgaatagacctttgtccaggacagcacggcgttgttcccgggaaacgtgggacattctggctatcaacggacatcacatcaacatcgaatgaaacattgtttctatttcattgtttttgtgaactatatcacaaaaaccagcttgttcgccagatcggcaatgtattttttgtgcgttttataaccgtattttttgtgtgacttctacgcgtccgtagagaaactgccggaaagcaaagatgtattattactactcttttattttttttcgtgaaattcagacctgataaaaatatcaagttatttatcaaaagaaaggagtaaagatgtataccccatcgtttacttgagtataaatctgatattatcaaaaatatttagtgtcctgcctggtatgcgaaagagattgcgcgtagttattaatggtaaatgttgatcggtaaaagtctgttgctaatattgataaattcatgcaccgtaaacctccatttggttcacgtcttattttgccaacaatagtcacaaataatgcagggaaataggctgaaaatgagtcaaagcacacgacgcaaggtgttgagatttctcggaacgatcattgtggtgttacttcctatattgctggcgatctggtttgctcatatccgggcagtctctgaaaccagaaatcagttacattcatttgcgcagttggtattagataaaacggagcgggttatcctgcaagcagatttagcccgcgatgccgctgaacaatatcaggggcaagcctgtacgccagcccatcaacagcgaatgctgaatattatccgcggtcgtttgtacattaatgagttgatttatgctaagggccagcgttttctatgctctacggttatgacgccaacaagtccttattttattccccgcgctgactataaacgaaagcctgacatcgctatttattactatcgtgatacgccttttttcaacggttataaaatgacatatatgcagcggggaaactatgtcgcggttatcaatcccttatcttatagcgaggtgatgtcagacgatccggcgttggcctggggaatgtatgatacggtgaccaacacctttttctccctgagtgaacaggcgcaggctgatcagctattacctttggtacgacggagtgaacctgtgttccaacagggtgagcgtttttatactctggttaaatcagcaaaacgaccggttgccgcgattgtgtcaacctcaaagcaacgcttttaccagaacctctttcatcagcttacgttaacgctaccgttagggatcatctgtagcattatcatcttatttatgtggtcacgatcccggcaggcatattactcaccgcgtcgattgctgcaacgggccattaccaggcaccagctttgccttcattatcagccgatcattgatatccgaaacgggacatgtgtaggtgccgaagcgctattgcgttggccgggctatcacggtccggtgatgagcccgtgcgaatttattccgctggcggaaaaagaggggatgattgagcagatcaccgattatgtcgtcgaagaggtatttaatgatttaggtggttttctggccgcgcacccgcatctttatgtctctatcaatctcgctgccgccgattttctctcttcccgactaattgtgatgattcatgaaaaaacgcgtcagcattcagtgcttgcgcaacagataaaggttgaagtgactgagcgcggatttattgatgtgcctaaaatgacgccgattattcaggcgtttcgccaggcgggatacgaggtggcaattgatgactttggtaccggctattcgaacttgcataacctgtactcattaaatatcgaccttttaaaaattgataaatcttttgtcgacacgctaaccactaatagcgccagccatttgattgtggaacatattattgaaatggcgcaaagtttgcggctaaaaatcattgctgagggggttgaaacggctgaacaggttagctggttgctaaaacgcggcgttcagtattgtcagggatggcactttgcgaaggcgttaccaccgcaggaattcatcgcctggctacaacaaacgcccgcgcctctgacgatacgcgggcagacgccctacaggcggtgacggtaatcgctgggagtgcgatcgaactcgcggcggaatacacgcgagaaggtttgctgcgatacatagcccaggtccatcgcgatatcaaaaatcgggcgctcggtcgttcgtagctcaacggccgccaacaggagacggcgctggcgaatatactcgcctaatgtttgatgcgttaccgtacgaaacatccgctgcaaataccacttggagtagcccgatttttttgccaccacatcaatgtttagcggttggtcgatatgttcatcaatccattcgataagggtctgaattatctgctgatgcgacatattgttgcctcttaaacagtattcgattcgtcgttttgtctgcgggcgagtataattcctcaagttaacttgaggtaaagcgatttatggaaaaaaaatctccccgtttaaaagccttactgacgccgggggaagttgcgaaacgtagcggtgttgctgtgtccgccctgcacttctatgaaagcaaagggctaattaccagtatccgtaatagcggtaaccaacggcgatacaagcgtgacgtgttgcgttatgtcgcgattatcaagatcgcccagcgtatcggcatcccgctggcaactatcggcgacgcgtttggtatcttgccggaaggacatacgttaagcgcgaaagagtggaagcagctctcatcgcagtggcgcgaagagttagaccgacgtattcatacgctggtggcgttgcgcgatgagctggacggttgtatcggctgcggctgtttatcgcgtagcgactgtccgctgcgaaatccaggcgacaggcttggcgaacacgggacgggcgcccggctgcttgaagatgattaacatgcactcggccatcgggctgagctcacctaaaactaaagcgccgctaagggcgctttagtttgtttccggtctttgtctttcgctctatcccgctgattacaggagggtttcccccgacgtcaacacccctcatatcgagcacgtggtggaggttccggtttgtgttgatactgtaagtgtaagcgacgacgccctgttcgccagcgaaatgctgattttttagccgaaatttttacggcaactgccataattttctatagttagttggcataccttacaggagacagccatgctgacggtgcaccatttaaatcagtctcgttcgcagcgcatcttgtgggcgctggaagagctggcgttgccttaccagattgtgcgttaccagcgtgaaaagaccatgctggcgccgccggcattgaaaaaagtgcatccgctgggcaagtctccggttatcgaagatcacggtatggttattgcggaatcgggcgccatcctggaatatttgcaggacacttacgacagtatcggacgctttaaacctgcggatgcgcaggggaaacaacactatcgcttctggctacattacgctgaaggttctctcatgcccttgctattgatgagactgctctttacctctctgggtaaaccgccggtaccattgggcctgcgaacgttgggcggcgttatcggtaagggcgcgcaaaaagcgtacctcaatccgcaactggaaacccatgcgcgctttattgacgggcatctggcaaatcacccctggtttgccggagagcagttaagtatggcggatatccagatgagcttcccgctatttgcgctgcttgcccgaggcggaatcgctcatctcgaccatatcaacgcatggaaagcgcgggtagaaatgcgtccagcctggcagcgagcgattcagcagggcggtccgtttaccattcccggcggataatggcgtttttgtgagcagattgcgcaacgtatttgctaacagcgatgcgaaaaattgttgctggattgcgcagggacgataacgtttgcgcatcgtctggcgatttattgagcatactaagcagaaaagcataaaaagcggcaaagttcagttgaaaaagcgttgatgatcgctggataatcgtttgcttttttttgccacccgttttgtatacgtggagctaaacgtttgcttttttgcggcgccccggttgtcgtaaatgtagcacaaggagataacgttgcgctgttagtggattacctctcacgtataccgacgaataataaattctcaggggatgttttctatgtctacgccttcagcgcgtaccggcggttcactcgacgcctggtttaaaatttcacaacgcgggagcaccgttcgccaggaagtcgttgctggcttaaccacgtttctcgcgatggtttactccgtcatcgtggtgccagggatgctgggtaaagccgggttcccgcctgctgccgtctttgtagcgacctgcctggtcgcaggcgtcggctctattgttatggggctttgggcgaatctgccgctggctatcggttgcgctatctcgttgacggcgtttaccgcgtttagcttggtcctggggcagcatattagcgtcccggtcgcgcttggcgccgtattcctgatgggcgtactgtttaccgttatctccgccaccggcattcgtagctggattttgcgtaacttgccgcagggcgtggcccacggaaccggtatcggtattggcctgtttttgttgctgattgccgccaacggcgtcggcctggtcattaaaaacccgctggatggcctgccggtcgcgctgggcgatttcgataccttcccggtgattatgtcgcttgtgggtctggctgttattctcggtctggaaaagctgaaagtccccggcggcattctgttgaccattattggcatttctattgtgggtttgctcttcgatcctaacgtccatttttccggcattttcgccatgccttcgttgagcgatgaaaacggcaactcgctgatcggcagcctggatattatgggcgcgttaaaccctgtcgttctgccaagcgtactggcgctggtgatgacggcggtgtttgatgcgaccggcacgattcgtgcggtcgcagggcaggctaatctgctggacaaagacggacaaattatcgatggcggcaaagcgctaaccaccgactcactgagtagcgttttctccggcctggtcggggcggcgccagccgcggtgtatatcgagtctgcggccggtacggcggcgggcggtaaaacgggcctgacggcgattaccgtgggcgtgctgtttttgctgatcctgtttctttcgccgctctcttatctcgttcccgtctatgcaactgccccggcgctcatgtatgtcggtctgctgatgctgagtaacgtggcgaaaatcgattttgctgatttcgtcgatgcgatggcggggctggtaacggccgtatttattgtactgacctgtaacatcgtcaccgggattatgatcggctttgccacgctggtcgtcgggcgtctggtttccggcgaatggcgtaaactgaatatcgggactgtcgtcattgcggtcgcgctggtcgctttttatgccggcggctgggctatctagctctgccttcattctgaaaaacgggcggcgttggccgcccgttttcattttcaggacacatcacgttaccttttgcgttaatctgaagaaggtgaaaccgaggcatgatgcctctctccatcataaaaaacatcgcaaacagggaacgcatggaaattttcttcacaatactcatcatgacccttgtggtctcgctgtcgggggtatttacgcgtgtattacccttccagcttcctttaccccttatgcagatcgccgttggcgcgctgttggcgtggccgacgtttggtttgcatgtggaattcgacccggaactcttcctggtgctgtttattccgccgctgctgtttgcggatggctggaaaacgccgacccgtgaatttcttgagcatggacgagagattttcgggctggcgctggcgctggtcctggtaacggtcgttggaatcggcttcctgatttattggctggtgcccggcattccgctgatccccgcctttgcactggccgccgtgctgtcgccgaccgatgcggtagcgctctccggaattgtgggcgaggggcgtatcccgaaaaaaatcatgggcattctgcagggagaggcgttaatgaacgacgcctccggtctggtatcgctgaaattcgccgtcgcggtggcgatggggacgatggtctttaccgtcggcggcgcgacgctggaattttttaaggtcgctatcggcggtattctggcgggttttgtagtcagttggctgtatggccgctcgctgcgttttttgagccgctggggtggcgatgaacccgcgactcaaatcgtcctgctgtttctgctgcccttcgcgtcttacctgattgccgaacatattggcgtctcaggcatcctggccgcggttgccgccgggatgaccatcacccgttctggcgtaatgcgccgcgcgccgctggcaatgcgtttgcgcgcgaacagtacctgggcgatgctggaatttgtctttaacggtatggtctttctgctgttgggactgcaattgccagggattctggaatcttcgctggcggcggcggaagctgacccgaatgtcgaaacctggatgctctttaccgatatcgtgctgatttatgcggcattgatgctggttcgcttcggctggctgtggaccatgaaaaagttcagcctgcgctttttgaagaagaaaccgatggagttcgccagctggacgtcgcgtgaaattctgattgcttccttcgctggcgttcgtggggcgatcaccctggctggtgtgctctctataccgttacttttgccggatggcagcggatttccggcgcgttatgaactggtattcctggcggctggcgtcattctgttctcgttatttgtcggcgtgatcatgctgccgctgctgttgcaacatctggaagtcgccgatcatgcgcaacagttgaaagaggagcgtatcgcccgcgcggcgacggcggaagtggcgattgtcgccattcagaaaatggaagagcgtctggcggcggataccgaagaaaacatcgataatcagttgcttactgaagtaagctcacgtgtcattggtaacttgcgtcgccgtgccgatgggcgaaacgatgtcgaaagctccatacaggaagaaaacctggagcgacgtttccgtctggcggcgctgcgttccgagcgcgccgagttgtatcatctgcgcgccacgcgagaaatcagcaatgaaacattgcaaaagctgctgcacgacctggatttgatggaagcgctactgatagaaaatcagtagtccttgtggcccggtggcgccatgctttccgggcctacaagtaggccggataaggtgcttgcgccgccatccggcaagggtcttaacccatggcttacggttgtttcagccaaaacccttcgcaacaggttaaccatgcccgggcgctgtgcgacagatacacgccctctcgccaaatcatgcccaactgccagcggagatcgctttccagcggtagccagcgcagcgtggccttatccagacgctgacaaatcggctccggcaaaatggcgatgccgacgcccgcttgcaccatggcggcgagaaaatcccattgcccgctgcgcacggcaatccgtggttttacgtcatgctggctaaataaggtcatcaactggcggctcagggcaaagtcttcgttatagataagaagaggatgctccgccagagcttcaggcgcgatggagtcgccggttgtccactgaccggaacggggaaccagcacgcacagcggatggctgaacagcgataacgtcgtcagcccgctcgcttcttccaccgggagcgcggtcatcgcaacatccagctcgccattcattaccgcctgctgtaccgtcaggccgccaaactccgaaattttgagttcaacgccagggtagcgttgtcgaaacaaactgattggcccggccatcaacatgccgaccatcgggggaatacccagccgcagcacgcccttattgagatggttaatatcgctcaactcggcctctaactggcgaaactcagcgaggatcgccagaccgcgttcaaacaccacgcgtccggtatcggtcagcaataacttacgtccgtcgcggatcagtagcgtacagttaagctcatcttcaagatttttcagcattttgctaatggtgggctgggtgacaaataacttctccgctgcgcgggtgaaactttgctggcgcaccacctcgacaaaataacgcagcgttctgatatccatgattattccttccgactatgcctgcaatgattttaattcatttctgcccgtgacggaggttctctatactggcgctccgtattatttttcaggacattccctcatggctgtggcgataagccgcgttacgcctgccgttgtgcaacgactccaggtaccggttcaggtactgctctatgcaggtttattcattttttcccaatatcttgtctcctggctgcacctgccgttgcccgcgaatctggtcggcatggtgcttatgttggcgctgatcgtttgccggattattccgcttagctgggtacgcgcaggcgcacgctggctgctggcggagatgctgttattctttgttcccgccgtcgtggcggtagtgaactatgcccatctgttactggtggacggctggcgcattttctcggtgatagcgatcagtaccttaatggtactcggcgcgacggcgtgggtggtggataaagtgtatcgctatgagatgagcaggctaaaccgtgaataacgttcagttaagcgtactgtgcctggtgattacgctgggaatttatttcgccaataagcgcctgtatcgccgttttcgcaaattgccgttgatgccattagtgctgacgccggcactgctggtgttaatgctggtgttcggtcatatctcctggcaaaactacattggtgaatcgcactggctattgtggctgctcggcccggcgaccattgcctttgcggtgccggtgtacgataacctcgcgattatcaaacgtcactggatgtcgctcaccgcgggcgtagtgacggcgacggtggtggcagtcaccagttccgtttggctggcgcgtctgttcacgttatcggatgagattcagcgtagtctggcggtacgttccgttaccacgccgtttgcgctggcggcggcagaacccctgggcgggcagccagatctggtggcgctgttcgtggtcgtcactggcgtgtttggcatggcggtcggcgacgcgctatttttgcgtctctctatccgggaaggcatggcaaaaggggcaggattcggcgcggcgtcacatggggcgggcacggcgcgttcctatgaacttggtcagcaggagggcgtcgtcgccagtctggtaatgatgctgtccggcgtggtgatggtgctggcagccccgctggtggcgagggtgatgttctgattttcctccgacccacagggccggaggaaacggtaagattaatgcgcacgcccttgttgtacgccgaatcccgtttgggagcggataaactgagcgcggaactgctcacgttcacggttgccttctgccgagttatcggtggccgagaagaaccagatccccaggaacgccacgctgatagagaacagcgccggatactcatacgggaagatcgctttttcgtggccgaggatctgcacccaaatggtagggccaagaatcatcagcaccaccgctgtcagtaaacctaaccagccgcccagcatagcgccgcgcgtggtcagttttgaccagtacatggaaagcagaatgatggggaagttgcagctcgcggcgatagcaaatgccaggcccaccataaaggcgatgttctgattttcaaacaggacgccgaggataatggcgatcacgcccagcaccaggacggtgattttcgacaccttcagctcttcacgttcggttgcgcctttgcggaacacgttggcgtacaagtcatgcgacaccgccgatgcgcccgccagcgtcagacctgcgaccaccgccagaatggtggcaaacgccactgccgaaataaagccgaggaacaggttgccgcctaccgcgttggccagatgcaccgccgccatgttattgccgccaatcagcgcgcctgcggcatctttataggcgggattcgcccccaccagcatgatagcgccgaagccgataataaaggtcagaatgtagaaatagcccataaaaccggtggcgtagaacacgctcttgcgcgcttcgcgggcatcgctgaccgtaaagaaacgcatcagaatatgcggcaagccggcggtgccgaacatcagtcccagacccaacgacaatgccgaaatcggatcttgcaccaatcctcctgggctcataatcgccgtgcctttcgggtgtaccgccatggcttcggtaaacagattattgaagctaaagccgacgtgtttcatcaccataaaggccataaaactggcgccaaacagcaacaggacggctttgataatttgcacccacgttgtcgccagcatcccgccgaacagcacgtacatcatcatcagcacgccgaccagcaccacagcgatgtgatagttgaggccgaacagcagttcaatcagtttaccggcgccgaccatttgggcgatgagataaagcgccaccactaccagggagccacaggccgaaagaatacggattggcccctgtttcaggcgataagaggcaacgtcagcaaaagtataacgtcccagattacgcaggcgctcggcaatcaaaaacaggatgattggccagccgacaaggaagcccagcgaatagatcagcccgtcataaccggaggtaaacaccagcgcggaaatgccgagaaatgacgcggcagacatatagtcgccggcaatcgccaggccgttctggaacccggtgatattgccgccagcggtgtagtagtcgctacgggaacgtacgcgtttagaggcccagtaggtaataccgagcgtaaacacgacgaaaatcaaaaacatgataatcgcctgccagttggtgggctggcgttcaaccgcgccgctaatggcatccgccgcatgagcggcgaaggggagtgcggcggcaagcgccgtcagaactctcttcataatactttcacctcatgcagtacggcgttattaagacgatcgaattcgccgttcgcccgccagatataaattccggtcaacacaaaagaaatcacaatcaccccgacgccaatgggaattcctcgggtgacgctggttcccgcatgtagaggcgtgcccagccagccaggcgcgaaggcgatcagtaaaataaagctgatataaaccgccagcatgataaccgacagaatcgtggcaaaccgttgccgtttttcaactaattccctgaaacgcgcactgtcttctatccgctgataaatttggtcattcatcacagagctctccagaggtccccctgcgtctttcgcgctacaggcgcgttggccgcactcgcgcgccccagccacatagtgaacttgaactatgctgctgagggtgtgctcgcttgccgccttcctgtaacacgaaatcctttgggggagggttttttatatttccctctcccggtttgagagagggcaggggtagggtcgtaggccggataaaacgcgttcgcgttgccatccggcatttatggttatgacggcatcgcgatggcctgcttctcttcgagcagtttctccaccacgccaggatcggcgagagtcgaggtatcgcccagattgctggtatcgcccgccgcgattttgcgcaaaatgcggcgcataattttgccggaacgggtttttggcagtgagtcggtccagtgcagcacgtccggcgtcgccagtgggccaatctctttacgtacccagttgcgcacctccgcgtacagttctggcgacggctcctcgccgtggttgagcgtcacataagcgtaaatcgcctggcctttgatagcgtgtggaatacccaccaccgccgcttcggcgatcttcggatgcgccaccagcgctgactcgatttccgccgtacccagacggtggccggagacgtttaacacgtcgtccacgcgaccggtgatccagtaatagccgtcctcatcgcgacgcgcgccgtcgccgctgaaatacatattcttaaaggtagagaaataggtctgctcaaaacgttcatgatcgccgaacagagtgcgcgcctggcccggccaggaatcggtgatgaccagattgccttccgtcgcgccttcttgcggatggccttcgttatccaccagcgcaggctgtacgccaaagaaaggacgggtggcggaaccggctttcagttcgatagcgcctggtagcggcgtgatcataaaaccgcctgtttcagtctgccaccaggtgtcgacgaccggacatttttccttgccgatcttcttccagtaccattcccacgcttcgggattgatcggctcgccgacggaacccagaatgcgcagtgaagaacggtcggtgccttcaatggctttatcgccttccgccatcagcgcgcggatggccgtcggggcggtatagagaatgttgacctggtgtttgtcgaccacctggcacatgcgagcgggcgttggccaattcggcacgccttcaaacattaaggtggtcgcgccgcaggccagcgggccatacaacagatagctgtgccccgtcacccaacccacatcggcggtacaccagtaaatatcgccagggtgataatcaaagacatacttaaaggtggtcgcggcgtagaccagatagccgccggtggtgtgcagcacgcctttcggcttgccggtggagccggaggtataaaggataaacagcggatcttcggcattcatcgcttcaggctggtgctcagggctggctttttcaatcaaatcgcgccaccacaggtcgcggccttcttgccagtcaatgtcgctgccggtgcgcttcaggacgatcacatgctcaacgctagtgacattcgggtttttcagcgcgtcatcgacattctttttcagcgggatactgcgtccggcacgtacaccttcgtcagcggtgatcaccagccgcgagctggagtcgataatgcgtccggcgacggcttccggcgagaagcccccgaagatcaccgaatgcaccgcaccgatgcgggcgcaggccaacattgccaccgccgcttccggcaccatcggcatataaatcgctaccacatcgccttttttaatgcccagatccagcagcgtattcgcgaaacggcagacatcgcgatgcagttcgcgataagagatatgtttactctgcgacgtgtcatcgccttcccagataatggcggtgcgatcgccattttcctgcaaatggcggtcaagacagttcgccgccagattcagcgtgccgtcctcgtaccatttaatcgacacattgcctggcgcaaaggaggtgtttttcactttttggtacggcgtgatccaatcgagaatttttccctgttcgccccaaaacgtatcggggtcgttaatagactgtttatatttagtctcatactgctctggatttatcaggcaacgatccgcaatgttggcgggaatggcgtgtttatgtgtttggctcatgctgttgttctccttgtaggatgttaataatatgtcgcataaacgttaaatgtagggtcttaataagttttgtttagtatttgggcgacagatcacgcaaaaagggaactgtgcaaataagcagcaatctattttttgattgtgtcccgcaaaattagataaattttcgggataacatgacgttatatgaaattttttaaaaaagtgatccgtgtccggaaatcagaaaagagagggagttttgtccaggttactaactctaaagtggtattttacatacacttacaattgattaaagacaacattttaagtgtggttatttgttacacatagaggagatcaatgtaataacagtatttgtgcggttgctgttatggaaaacgataaaaaatcgccattaaagataatggcgcaatctggatgagacctctatggcaaggaaaacactacgcgcacgccgtttcttcagccttatatttccttttttcttcattacctctgtttacgctgagcaaacgcctgaatccgcaaaaaccgttactgttgaagcgaaaaatgaaatgttcgcgcctcaacaccccgaccaatatcagtcatggaaagcgacgtcagaacagtctgcccgtgaagatgcgctggcggaagaccctcgtctggtgatcctgtgggcgggctatcccttctcccgtgattacaacaaaccacgcggccacgcgtatgcggtaactgacgtgcgcgaaacgctgcgtaccggcgcgccaaaaacggcggaagacggcccgctgccgatggcctgctggagttgtaaaagccccgatgtcgcgcgccttatccaacaagaaggcgaagacggctacttccatggcaaatgggcgcgcggcggcccggaaattgtcaacgatttgggctgtgccgactgtcataacaccgcgtcggacgatttcgcccaggggaagccagcgttaacgttgtcgcgcccctatgccgaacgggcgatggaggctatcggcaaaccgtttgataaagcgggacgatttgatcagcaatcgatggtctgcggtcagtgccacgtggagtactactttgacggtaaaaacaaagccgttaagttcccgtgggatgagggcatgaaggtcgaaaatatggagcaatactacgacactatcgccttctctgactggactaactctctgtcgaaaaccccgatgctcaaagcgcagcacccggaatatgaaacctggagcgcgggcattcacggtaagaacaacgtgacctgtatcgactgccacatgccgaaagtacagaacgccgaaggcaagctctacaccgaccataaaatcggcaacccgttcgacaatttcgcgcaaacctgcgccaactgccacacccaggacaaagcgtccctgcaaaaagtggtcgccgagcgtaaacaggcgattcatgacctgaaaatcaaggttgaagatcagctggtacatgcgcacttcgaagcgaaagccgcatgggatgcgggggcgacagacgcggaaatgaaaccgattctgaacgatattcgccacgcgcagtggcgttgggatctggcgattgcgtcacacggtattcatatgcatgccccggaagaaggtctacggatgttaggcagtgcgatggataaagccgcggatgcccgtactaaactggcgcgactgctggcgaccaaaggcattacccatgaaattccgctgccggatatttcgacgaaagagaaggcgcagaaagcgattggtttgaatatgcaacaaatcaacgcggagaagcaggacttcctgaaaacggtcgtaccgcagtgggaagatcaggcgcgtaaaaacggtctgttaagccaataacctcacatgtgacaaatttgccggatgacagcgcaagcgctttatccggcctacagaagtcttgtaggccttaaagctgcgcgccatcaggcattatgtaatggagtgaatatgagcgtattacgttcgttattaactgctggggtgctggcgtcaggcctgttctggagcctgagtggaattactgccacgccaacgccgcaggagtcggatcaacgctggacggtcacccagcagcgtaatccggatgctgcctgtctggactgtcacaagccggacaccgaaggtatgcacggtaaacatacgggcgctatcaacccgaacaataaattgccgataacctgtaccaactgccacggtcaaccgtcgcttcaccaccgtgaaggggtgaaagatgtgatgcgttttaacgacccgatgtatacggtagagcagcagaacagcgtctgtatgtcctgccacttgcctgaacaactgcaaaaagcgttctggccgcacgatgttcatgttactaaagtgacctgcgccagttgccattccctgcatccgcagcaagacacgatgcagacgctaagcgagaaagggcggatcaaaatatgcgtggattgccacagcgatcagcgtactaacccgcactttaatccggcgtccgttccgttgcttaaggagcagccatgagttgcacccgacgtcaatttattacccgcgtcggcgcgctggcggcggtcagtgggatggcaggacgcgttgtagcgaacacgttgaatattaatggcgtgcgttatggcatggtacacgatgagtcattatgcatcggctgcacggcctgcatggatgcctgtcgggaagtcaacaccgtgccggaaggcgtatcgcgcctgacgattattcgcagcgagccgcaggggacgtttcctgatgtgaagtatcgcttcttccgccactcgtgccagcattgcgaccatgccccctgcgttgacgtctgcccgacgggggcatcattccgcgatgccgccagcggtattgtcgacgtgaatccggacctttgcgtcggctgccagtactgcattgccgcgtgtccctaccgcgtgcgctttatccatccggtcagtaagacggcggataaatgcgatttctgccggaaaaccaacctgaaagcgggcaaacagcccgcctgcgttgagtcatgcccgacgaaggcgctgacgtttggtaatctggacgatcccaacagcgatatttcccgtttgttgcggcagaaaaccacctatcgttacaagctggcgctgggcacaaaaccgaaggtctaccgcgttccctttaactatggggaggtgagccaatgacatccgcttctgcatttcattttgcatcactggtgtgggactggcccatcgccatctatctgtttctgattggcatctccgccggactggttacgttggcgattctgctgcgccgcttccatccggaggcgggcggttcggacagtacgctgctgcgcactacgctggtgttagggccgggggcgattattcttggtctgctgattctggtctttcacctgacgcgcccgtggaccttctggaagctgatgttccactacagctttacctcggtgatgtcgatgggggtgatgctgttccagttgtacatggtagtgctggtgctgtggctggcgaaaatctttgaaaaagaggtgattgccctgcaacagcgttggctgccgcggtcagggatcgtgcagaaagtgctgacgctgatcgcgccgtttcatcgcgcgctggagacgttaatgctggtactggcggttctgctcggggcgtacaccggctttctgctgtcggcgctgaaatcctatccgttcctgaataacccgatcctgccggcgctgtttctgttctccggcatctcctccggcgcggcggtggcgctgatcgctatggcgttacgccatcgtagcaacccgcacagcaccgaggcgcgctttgtacatcgcattgaaaccccagtggtatggctggagatcttcctgctggcggccttttttatcgggctggcgctgggcgatgacggcaaaatgcgcgcgctggcggcggcgctgggcggcggattctggagctggtggttctggcttggcgtcgtagggctgggattgattatcccgctgctgctgaagccctgggcaaaccgtagcgtcacgtttcacggcgtgctggccgtttgcggcgccagtttgaccggcgtgctgctgctgcgctttttcattctttatgcgggacagctaacggttgcataatctggacatcttccttcctgaagccggatttctggcgctgttgttgagtctcggggtcaacgtgctgaccccgctggcgacgtggtgcgggatggggcagcactggcgcggcgtcatgcgcctgacgacctgcggcgcgtggacggcgttcacgctgctgctactggcgtttgcgattctggttagctgttttctgaccagcgatttttcggtcgtttatgttgcgcagcatagccatagtcagttgtcatggggactgaaactggcggcggtatggggcggtcatgaaggttcgctcctgctgtgggcgctgcttctttcggggtggacggcgctattcgcctggcgctcccggcatgaatctgacgcgctttttccgctgaccctgagcatcttgtccttcattatggcctcgctgctgctatttattgtgctgtggtccgatccgttcctgcgtattttccctcccgccatggaagggcgcgaccttaatcccatgctgcaacatctggggctgatcttacatccgccgctgctctatctgggttatggcggcctgatgaccgcggcgagcgtagcgctggcttcgctactgtgcggcggctttaacgccacaaccgcctgggtttgctggcgctgggcgttaccgggttggtgcgctctgacgctggggatcattctcggatcgtggtgggcatattgcgaactgggctggggcggctggtggttctgggacccggtggaaaatgcctcgttgttgccgtggcttgccgccagcgcgttgctgcacagtctgtatgtcagccgccagcgcgggagcttccgccactggtcgttgctgctggcgatactgacgctgatcctctcgttgctgggaacgctgattgtgcgttccggcattctgctctccgtccatgcttttgcgctggataacgtgcgcgcggtgccgctgtttatcctttttgccgcgttaagtctggcatcgcttgctctgtacggctggcgggcacgggagccgtatccggcgacgcgtttgggcggcggaaagtgcgaaacgctcattctgacgacgctgctgctctttagcgccgtcttgttgatcgtgctggtcgggacgctctaccccatgatttatggtttgatgggctggggaaggctttcggtgggcgcgccctattttaatcgcgtcacgctgccgtttggcctgctgatgctggtagttatcgtgctggcgacaatcagaagccgcaaagtctctgtgcgttgtcagcttccggcattgctggcgcatacgggcgtatttatcttcgccgccgggatcatggtttccagcggcagtcggcatgaaatcagccttaacctcagccccggtcagcaggtggtactggcgggctatacctttcgtttcgagcgtctggatctggaagccaaaggcaactacaccagtgaaaaagcgcggatcacgttgtggcggaatgaaaaacgcattggcagcctgcagcctgaaaggcgcttctatgccgcgcgtcgtcaacagatgatggagccggggattcactggaacctgctacatgactggtacgcggtgatgggcgaaaaaaccggaccggatcgttacgccatgcgcttatacgtgcagaccggcgtgcgctggatctggggtgggggattgttgatggtgtgtggagcgctgctgagcggatggcgggggaggaagcatcctgagttattgcctgatggcgctgcgcttatcaggcctacgagtgaaaagcatggtaggccggataaggcgttcacgccgccatccggcaaaacgatgttacttttggctttactgatttttctgccttttgccacccatgcccaggtggtggacacatggacgtttgccaacccgcagcagcaggagaaagcgctgtctattgccagtcagctgcgctgtccgcagtgtcagaaccagaacttgctggaatccaatgcgcccgtggcggtcagtatgcgccatcaggtttacagcatggttgccgaaggtaaaagcgaagcggaaatcaccgcctggatgaccgaccgctatggtgatttcgtgcgctacaacccgccgctgaatgagcaaacgctgctgttgtgggcgctgccgtacctgctgttattgctggtgggcgtggtggcctggcgggtgagaaagcgtcagcacgcaggagagggggaacaatgagccagtctgaacactccactgcgccgttacgtcccatgcctgtaaagcgtctggcggctgcggcggtgttgatggtggctgcctgtgtcggcggctatctgttgacgccgaaatggcaggctgtgcgtagcgagcaacagcgtctggccgatccgctacgtgactttacgaacccgcaaacgccagaggcgcagctttccaggctgcaagaaaaaatccgcgccaatccgcaggatagcgagcaatgggcgcggctgggcgagtattatctctatcgcaatgcgtatgacaatgcgctgctggcatatcgtcaggcgttgcgtctgcgaggcgataacgcgcagcttttcgccgcgctggcaacggtgctgtattaccaggccgggcaacatatgacgcctgcgacgcgtgaaatgattaataaagcgttagcgctggatgcgacagaagtgaccgcgcagatgctgctggcggcggatgcgtttatgcaggcggattatgcgcaagccgtgtcgctgtggcaaaccttactggatgccaactcgccgcgagtgaaccgcgcgcagctggtagaggccattaatttggctaaattgttacaaaatcggcagaaataattttttcttttttgtgacttttgtcatgtgtgctgtttaaaaaaacggcgaatgagacacaagtaaaaattaattacctcagtgtattattcatttttgacgaagtaaaaaactttccataacaaatagttattcatcattaacgccataaactcgcgttattatgcataaaaacagccaaaagccctgttatgaaagggttgcgcaagacgctatgcaaatgatactgattatgcgcgttaaaaaactctacaaaccaacgcaacacaaatcataccctttcagtatgtattgctctcatgctttcggcggagagcaacgcttcatcgaggaagtctgttgttatgaaaaatttgaaagtcagcctggcctggcaaattttgctggctatggtgctgggcattctgttgggcagctatctgcattatcacagtgacagtcgtgaatggctgattgccaacctgctgtcgcctgctggcgatatctttatccatctgattaaaatgatcgtcgtgccgatcgtgatctcgactctgattgtcggcatcgccggcgttggcgatgcaaaacagctaggccgtatcggcgccaaaaccattctctattttgaactgatcactacggtggcgattatcctcggcattacgctggcgaatgtctttcagccaggctcaggcattgatatgtcgcaactggcgaccgtcgatatttcgaaataccagaacaccacggcggaagtacaaagtcatgcgcatgggctgatggggacgatactgtcgctggtgccgaccaatatcatcgcatcgatggccaaaggggatatgctgccaattatctttttctcggtcctgtttgggctggggttgtcgtccctgccggcaacgcaccgcgaaccgctggtgacggtatttcgttccatctctgaaaccatgtttaaagtcacccatatggtaatgcgctatgcgccagtgggcgtttttgcgctgatcgccgtcacggtggcgaattttggtttcgcgtcgctgtggccgctggcgaaactggtgctgctggtacactttgctattatcttctttgcgcttgtagtgctgggcatcgtggcgcgcctgtgcgggttaagtatctggattctgattcgcattctgaaagatgaattgattctggcgtactcgaccgccagctccgagagcgtactgccgcgcattatcgagaagatggaagcttacggcgcgccagcctctatcaccagtttcgtggtaccgaccggttactcatttaacctcgacggctccacgttataccagagcatcgccgccatttttatcgcgcagctatacggtatcgacctgtcgttgtggcaggaaattgtactggtgctgacgctgatggtgacgtcgaaagggattgccggcgtgcctggcgtttccttcgtggtgttactggcgacgctgggaagcgtgggcattccgctggaagggctggcgtttatcgctggtgtcgaccgtatcctcgacatggcgcgtactgcgctaaatgtggtggggaatgcgctggcggtgctggtgatcgccaagtgggaacacaagtttgaccgcaaaaaagcgctggcctacgagcgcgacgtgctgggcaaatttgataagaccgcccaataacggattgccggatggcgctttgcttatccggcctacagcgaaagagaatgtaggccggataaggcgttcacgctgccacccggcaacctactccgggttgcctgatggcgctacgcttatcaggcctacaacgactacgttcatcaggcaataaacatcagccattcgttagcgtttcgaactcttcgcaaccggtatcaaacccttccagacagcttagattcaaccagtgcaacgccttctgcttattcttttcaataaagcccggttcaccgtttaaaaacatcattcccgcccagtattctgaatagccggtacgggaaatggcggaactgcgtttgaaataccaggcggctttttcatcatcggcggcaatgcccacgccgttggcgtaaatcaggccaagcaacatttgcgcatccaccgcggagtcgttatccagatcttcagaggccttttgcagcagcgagatggcttttgggtagtccgggcgcccggcctgggtgttgaccaggatccgcgccagcgtaatttctcccgctttactgcccgcgttagccgccttttcagccagctttttcgcgtcgggataatccaggcttaccggattagtgattttgatttgcgccagtagcgcgcaggcgtcggcgtcgccactgtcggcggctttttgcgcccagtattcagctttgttcaaatcgccatagctcaaccaactgtcggccagaaaatattgtgcgcgtctgtcacctgcctctgctgcctgcaaatactggctacccggctcaggatctgcggcatgggcaaagaatgtcataaacaacatcaatgcaagaagtagtttcattttgagttttatttagggtacggaaaagacagtataaagagatcgtatggataaaaaaacagcctccgggcggaggctgttatagggaaaatgcctgatggcgatgctaatgcatctaatcaggcctacagtagacgcaggccgaataaagcattctgatgccgccatccggcagatcaacccattgcgctttcgcgcaggcgggttttcagcttgttgtactcatcaatcacatactgctcggcggctcgctgatcggcgatcggctcaacgcgtacggcgcagtatttgtactccggcgttttggtaatcgggctgaggttttcagtcaccagctcgttacaggcgccaatccaccactggtaggtcatgtaaatcgcccctttgttcgggcgatcgctgacctgcgcgcgggtgatgattttacctttgcgcgaatgaacccacaccagcgcttcatcttcaatgcccagacgcgcggcgtcggcggtattgatttgcgcatagcccggttcatcggccagcgcggccagcgccgcacagttaccggtcattgagcggcaggagtagtggccgacttcgcgcaccgtcgacagtaccatcgggtactcttcggtgagtttatcgataggcgctacccagtcgcaggtgaagaactgcgccagaccgttgggggtatcgaacttctctttaaagaggtacgaggttccctgatcggcatctgacgtgtcgcggcacggccactggatataccccagctcgcccattttctcgtaagtggcgccgtagaaatccgggcacagatgacgcaactcatcccagatctcctgggtgttgttgtagtgcatcggatagcccatccgggtggcgatttcactgataatctgccagtcggttttcaggtcccacttcggctcaacggctttaaagaagcgctggaagccacggtcagccgcagagaagacgccttcatgctcgccccatgaggtagagggtaaaatcacatccgccgccgacgcggttttggtcatgaagatatcctgcacgatgaccagttctagatcctcaaacgctttacgtactgcagagagttccgcatcggtttgcagcggatcttcacccataatgtacgccgcgcgcacttcgccatgcgccgcacggtgcggcagctcgctgatgcgatagccggtatgcgcaggcagactttctacgccccaggctttagcgaacttctcgcggttttccgggaacttaacgtactggtagcccggataagtatccggcagcgcgcccatatcgcacgcgccctgaacgttgttctggccgcgaaccgggttaacgcccgcgcttggcttgccgaggttgccggtcagcatcgcgaggctggtcagtgaacgcacggtttccacaccctgatagaactgggtgacgcccataccccacaagatcgctgcgcttttcgcgctggcatacatccgcgccgcctgacgaatttcctgtgcgctcacgccagtgatctcttcgacggactccggcgtatagctttcgacaatcttactgtattcttcaaaaccttcggtacggctggcgacaaacgctttgtcgtacaggttttcttcaataatgacatgccccatggcgttgagcagcgcgatattcgagccgtttttcaacgcgatatgcatgtcagcaatgcgcgcggtttcaattttgcgcggatcgcagacgataattttcgccccgttgcgtttagcgttaatcacatgattcgccacgatagggtgggaatccgccgggttatacccgaagacgaacactaaatcagtgttatcaatttcattgatagcattactcattgcgccgttaccgaccgattggtgcagacctgcaaccgatgggccgtgtcagacgcgagcgcagcagtcaacgttattggtaccaataacggcgcgtgcgaatttttgcattacatagttggtttcatttccggtaccgcgagaggagccggttgtctggattgcatccggaccgtacttcgctttgatggcgctcaaacgttcagcgacgtaattgagcgcttcatcccaggaaacagattccagtttgccgccacgctggcgacggatcattggggttttcaggcgcggggtcaggatctgggtatcattaataaaatcccagccgtagtagcccttcagacacagggtaccctggttggttttcccctgcgccgcctcagcccggacgattttgccgttatcgaccaccagattgattttgcaacctgatgcgcaatacgggcaaaccgtgacgacttttttcatcggtttcgctccagttaatcaaatcgcgcatacgcgctgtcgccctcagtatgcatgttttatgccacttttttagtatgggctttccctgatattacgggcgaattttgctcaaaaccctgacgaaaaacaggctatcgtcagttttgacgtgtcgaaagaaaatgccgcatgacatttattatggggagaaacgcggagcgcaggccagataaggcggagccgctatccggcaatctgctctgcctgaagtggaaattatccggatggatagactcaaggccagggaacgctttgagactaacgccaggatagaacaggccgcggcaggcagttccataccgcggcccggcttcagaggaggctgaaaaggattatcgcggcaaaaatagcagcaataacgagatatttcagcgcgtaatagagagtgcggtttttctttttcagacgttgcccggcatcgcgtgctgcgtgaacgtatttaaagatgcgattaatcgcaccggtgcgatcgttctcgtcgtttggcgaactggcggcggacatcaacgatgcgccgacccagtggtttacgctctgcgcccagcgccatttcattgggcgctcaatatcgcaaaagaggataatacgcgtctgctcagttttattttccgcccaatgaacgtaggtttcgtcgaagatgacggctttgccgtcgcgccagctatggcgctgtcgatcaacttcaataaaacagcggtcgtcattcggtgtgcttaatccaagatggtaacgtactgaaccggcataggggtcgcgatgttttcccagataggccccgggaggcaactcggcgaacatcgccgctttaatagaggggatgctgttgaccagctttgtcgttatcgggcataacgtttccgccgacgggtgggcatcggaataccatttaaggtaaaaccgtttccagccgcgcttgaaaaaggtattgaatccggcgtcgttattggcctgcgcggcttttatgtgatgctgaagctgtagtgcctcttcacgaatcacctgccagttttccgtcagcttctgcagctctggaaatgccgtggtatcaaagtacggctgctttgccggtaacgttgagaagcgagtcatgaacatattgatcggcgccataaacgtcgagtggtcaaagagctgacgggaaagtttttgtttttccaccccgcgtgaatgcgcataaatgacgctgataataaaaataccgataatgattgctgcgaacataacgtcactgtccttctaagaaaacctcatcccgggattttcaggcaaccctcccggtgatgccaaagagaaaagtgtagttcgttgacaataaatttacatttctacaacttaaaagggccatttttgctaaagaagcgagtcagcccgtttaacctttatccaggcttgtcgacagtagaattgagatgactccgctacttcacccggtgatggctgattacgttatgccttatctcccgatgacggctgccagatcacaatgctttcgtaaaccgaaaatgactttgcttgtaaccttcgcgaagataaaaacggtgtgcatcgcggcgtttaatatttgtggaaagctccgttagctcggcgcccgcctgacgtgcttcttcttctgcccaggccagaagctgactgccaattttttgtccccgcatcggcggtaataccaccagctcctgaatttcgccaatccagttggcatgatggagatgaaactgcatatgcaggctgatcatgccgaccacctctccgttgcgcagcgctaaacgataatgaacgttggggtccagtaaattagcggcgaatccatccctgaaagcctgataatcaagctcatttttaagtaactcacagataagcgcgtaaacagaatcggtatcctctgttgtcgcgtggcgtaattcacagactggcataacgtcctcccgacgcctcatcaggatcaaccatctttcgccagactgtagcaaactaccgtcattatttattctatgacagttaaacggcggataacgtgcagccaaagatcactctgatggcaagggggagggcgagcctcccggggagttaggtggcaggctgatgtttaaccacgttaatcatccacggcacaccgaaacgatcgctgaccttgccgaaaccctgcgcccagaaggtctcctgccagtccatttcgatttgcccttgtgcggcaaggttatcaaaccagcgcttcccttctgctacatcctgggtatcaagcaccagcgtaaagccggaataatgcgcccttcccgacgcgctggcatcactcatcatgatatcgctgccggcaatgcgcatgttggcgtgggcgatagctgtatcgggaaagcgcattcctgacgggcaaccctcttcgttatccgccgccgaggggggcatttcaccgaagctgagtttataaagcagttctgcgcctaacgtttgttgataatacgcgatggcgtcggcacagttgccggcaaaagagagatagggacttaacggcatgatggttacctcaggtaagagatgctcgttaagtgtagttcgaaattggcacaatattgtcggtggcagggccgctcaggcccggtaagcaaggcgctaccgggcaatgacacggtaaatcagttctttttcacgaactcggatttcagtttcatcgggccaaaaccatcgattttgcagtcgatgttatggtcgccttcaaccagacgaatgttcttcactttggtgccgattttcagcatggaagagctaccttttactttcagatctttcacgatggtgacgctatcgccgtccgccagcaggttgccgttggcgtctttgacaatcagctcatcgctctcctgagcgggttccgcatcgttccattcgtgagcgcattccgggcagatgaacatgccgttatcttcgtaggtatattcggagttacattgcgggcagtggggtaatgacatgttggtatcctcaaaaagtcagcgggggcaaacgcgcccaaaaatggcagatcgccgaaaaaggccgcaattatacacaaaatccttagcgttgtcgggactattgccgcttttataaaagggtctgcgccacgccagtcagcaatggtttacactcgaataaccgcttttttactgtcaccacagcgcattagggcgtccttatttacaccttttgaccgaattgacatatatgtgtgaagttgatcacatatttaaaccctgttagggtaaaaaggtcattaactgcccattcaggcgtcaacaggttcggttgtacagtccgtaaccggacagtgtaagtaaacctgctacgcttgtatgagggatagcgttcgcgcccctccctccgctcgacggcgacgctggcgcggtatgccagtgcccgccgtatatagcgctacagggcttagcctatgaggacagctatgctgaaaaggaaaaaaataaaaccgattacactgggcgatgtgaccatcattgatgatggtaaacttcgcaaagcgattaccgccgcctcgctgggcaacgcgatggagtggtttgattttggtgtttatggatttgttgcctacgcgttgggtaaagtctttttccccggcgccgatcccagcgtccagatgattgccgcgctggccacgttttccgttcccttcctgattcgtccgctcggcgggttattctttggtatgctcggcgataaatacgggcgccagaagatcctggcgatcacgattgtgattatgtcgatcagtaccttctgtatcgggttaatcccctcttacgcgacgatcggtatctgggcgccaatactgttgttgctgtgtaaaatggcgcagggcttctcggttggcggggaatataccggcgcgtcgatctttgtcgcggaatattcgccggatcgtaaacgcggatttatgggaagctggctggattttggttctatcgccggattcgtgctgggcgcgggcgtggtggtcttgatctcgacgattgtcggcgaggagaatttccttgagtggggctggcgtattccgttctttatcgccctgccattggggattattggtctctacttacgccatgcgctggaggagacgccagcgtttcagcagcacgtggataaactggagcagggcgaccgcgaagggttgcaggatgggccgaaagtctcctttaaagagattgccaccaaacactggcgtagcctgttgtcatgtatcggtctggtgattgccaccaacgtgacctactacatgctgctcacctacatgccgagctacctgtcgcataacctgcactattctgaagatcacggcgtgttgattatcatcgccattatgatcgggatgctgtttgtgcagccggtgatggggctgctgagcgaccgtttcggtcgacgtccatttgtgattatgggcagcattgcgctgttcgcgctggcgatcccggccttcatcctgattaacagtaacgttattggcctgatttttgcaggtttgttgatgctggcggtgattctgaactgctttaccggggtgatggcctcgacattgccggcgatgtttccgacgcatattcgttatagcgcgctggcggcggcttttaatatctctgtattgattgccggtctgacgccaacgctggcggcctggctggtggaaagctcgcaggatctgatgatgccggcgtattatttgatggtcatcgcggtgataggcttgattaccggtatttccatgaaagagacggccaatcgtccgttaaaaggcgcaacgccagcggcgtcggacatccaggaagcgaaggaaattctgggcgagcattacgataatattgagcagaaaatcgacgacatcgatcaggaaattgcggagctgcaggtcaaacgttcgcgtctggtacagcaacatccgcgtatcgatgaataaatttcgcgcttaaggttcgcttaatctctcgcgggcatactctcctccatacctttggaggagagcgtcatgaaaagctatatttataaaagtttgacgaccctgtgtagtgtgctgattgtcagcagttttatctatgtgtgggtcacgacgtattaaacgcctgttatgcctttttcaacagcacccaggcacgggtgcctgttctttccgtacggttttgcaggaaaaactgtccctgatgtagttgggtgatgcggctgacgatactcagccccaggccaattccgccataacggctgtccatccgcacgaacgcttcgcttagcttcccgcatttgctttcatcaatacccggcccctcgtcttcgaccgccataatagcgtcggggtcggcgctaatgtggatagtgatatgggttccttcagggctatagcgatgcgcgttttccaccagatttcgcaacagcatacgcagtaacgtcgcatcaccgcgcaccaccacgtccgccgcgctttccggcagcaacagagtttgctggcgcgtttccagcatggtgttcagctcatcgtaggaggggaggatcacatcttccagcagttttacttcctgataattcccggaagagaatgactggcccacgcgcgccagttgcagaagctgggagacgctatccatcatctggtcaagacgggcgataagcggcgcgacatcaacattgtgggtttttgacaataattccaggtgcaaacgcacccccgacagcggcgtgcgtagctcatgggccacatcggcggtaaaaaggcgttcattgtcgagcgtggtggtcaaacgcgtaaccagttgattgatcgccgagacgacggactcaatctcaagcgtggagctgtgaatggcgatcggcgccagattatccgccgtccgcgcttccagctctttttgcagttcggcgagcggacgggtaatacgccgtaccgcctggtaacaaattagcagcgtcaggctaaccataaatacgccggggacgatcaggctggcgaccgcctcgcgaatttcgtgcatgatatggcgatcgttgttgcgattatcccgcagcgcctgctcgaacaattggatttgctcagtgctttcatgccataaccagaaggtactgattaactggaacaccagcagaataagaccaattgtcagcattaaacgctggcgaagggtcatcgctcttcgctgaaaacgcatcaggctcacttagctttcctcagtggcaaccagcatgtagccaaacccgcgaaccgtgcgaatgcgcgacttgccgactttgtcgcgcaaattatgtatatgcacttccagagtgttggtcgagggttcgttatcccagttgtagatatcgttataaagaatttcccggtgcaccggactgcctgccttgagcatcaaccgtgagagcaacgcgtactccttaggcgtcagggtcagttcctgtccatccctccatgcctgatggcggcctatattgagcgtcagattgccaaccgtcagttcactttcaccctggttattatggcggcgcagcagcgcgcggatgcgggcgtgcagctcctccagggcgaagggtttaaccagataatcatctgcgccgacatccagcccggtaatgcggtcattgagcgtatcgcgggcggtcagaatgagtaccggcagggtatattttttctgtcggattcgcgtcaggaaatgcaggccatcctcatcgggcagccctaaatccagcaccatcagactgtaatgaccagactccagactatgctcggcggcacgcgctgtcgaaacgccatcacacgcatagccttcggtttgcgcggcgagtattaacccctgtaataatagcgtgtcgtcttcaacaatcagtatcttcattcgcttagtctcctgcacggttgcagaatatcatctgcggcctggtaatacgtcgtttgtacgccggttaatcccagcatggttgagaaaagattgtcctgtgaataatccagcgtgctcgcccgtttttgcaggcaggcctgatccacctgataacgctgttgataatctttagaaagccaaatgagcatcgggacatgtttttgcgtatccggcgcaatggaatacggcaaaccgtgtaaataaacgccattttcacccaatgattcgccgtgatcggaaagatagaccaggctggtggtgaatttatcctgatgagatttcagcaggttaatggctttatctacaatatagtccacgtacagcacggtattatcataggtgttgatcaactgctcttgggaacagttctgaatttcgttagtgtcacaggttggggtaaattttttaaactgcggtggataacggttgtaataggttgggccgtggctgccgatggtatgtaatacaataacgccatcgcctttcaaatggtcgatatagtcttccagaccgtgaaataacacttcatcgtagcactcgccgtcgatacattgtccgggcaggtttagctcggtgacattttgatgcggaacgcgatcgcatgcgcctttacagccgccgtcattatcattccacagtacgttaatccccgcgcgctggataatatccagcagcccttcctggtgatgcgccagctcttcgtcataatgtttgcgcggcatatcagaaaacatgcagggaacggagatcgcggtcgccgtaccgcaagaggtggtatgcgggaagtagatcacatcgtctttcgccagccgcggattggtgtcgcgcggatagccgccaagagagaaatcatcgccgcgcgaggtttcgccaacgatgagaatcgtcaggtttttgcgatcgcctttcagcattaatggattgcgatgggcatcctcgccaatgcgtaccagcggcaaattcgccagccgttgatgtgaataccatgaccaactggcgacaatactgttcgatgggcttaatgctttgatcaactgtttattatttcgaaataacgaggcgtaatctttatagaaaaaggcggcgaccagaataactaataaaatagagatcaggacgctggccaggcggtaaagcccgctacgtaagcgcggcgtcgccggacggattttgacccagaaggcaatcacggctgccagaacgccgcttaatcccagcgtcagcaccatttgcggcgtcatcagcgcaaaggtttccgcgggcgtggtatccatcatattggcgatcatggagcgatcgatgatgatgccgtaagtcaaaataaaatactgcgcggcagcgccgaccagaataaaaacgcaggccagcagtcggtttagccaaataaatgaggccagcgtcagcacactattgaccacgctaaacgcgacgaccggcatggaaataaacaccagcacattgcgcagcgagtttaacggtaggtcttgtagtacctgcttgtagaacgcaatgttcaggcagacggcaatataaaaggaaaaaagcagaagccaggcgatttgcccaagaacaggtcttttaagaaagcgctttaacatgttgatgcgtccatcgattcggtgacgctaatcgtgacaaagtaaaattaagtgaaccttaagaacttaatgttggtggcggccggataacctgcgctatccggcctgttgcgataacattaactacacgtggtcaatcctgtttaaccggcgcatccagcggatacgggtttttgtgaatgcggttgtagttcaacgcatacagcgcggtgatcaccatcaacgtgacgaacgaccacatcacttctttggcgccggaaccgatgaccgcccagatgcaatacacaaacgcgacgaaggtaatcagcagatacagcgggcgcgctttaccaaagtgaccgtggcccaacagtaacagcgcggcacaggtgtaaagataaggcaccagggtgaagataaccgacacggaggagaccagaccaaactctttcgcggcgttcggcgacatactgctgaactggaagatagtcatcagcacgccgacgataagcaacccagccactggcgtaccggctttattaacccgtgcgaagattggcgggaagagaccatcgtccgccgccgcttttgcggtttgaccggcaagcagcgtccagccgccgagagagcccaggcaacctgctgccgcacagaaggaaacaatagcccctgcggtatcgcccagcgccatacgcgccgcgtcaccgaaaggcgatgccgacacgcgcagcgccgcgttggggatcatccccataatcgccgttgtggagagcacatagcagacggcggcgatcagtaccccgccgatggtggcgataggcacattgcgtttcgggtttttgaccacaccggccgcaacggaggcactttctaccccgatgaatgaccacagcgtaacgttcaacgtgctttgaatcgcgccgaaggtattcatgccgctcacgttccaggccgccatataggtttcgcctttaaaccagaaccagccgaagaccgcaatccctacgataggcaccagcgccagtacggtggcgacggcctgtacgcgggtaatcattttcggcccgacgatgttcagcagcacaaaaatccacagcaccgcgacgcaggtaagcgttaataccagtggatctttcagaattgggaagaaatagctcagatagccgacgccgataacgaccatcgcgatattaccgatccagcatgccagccagtacagcacgttcgtttgatagcccaaaaacggcccgaagcagcggcgtgcgtaggcataggaaccgccgggactgggatctaaggacgacattttggcataaaccatcgacagcgccagggcgccgatgatagtgaccagccatccgtagattgcaatcccgccagtggccgccaggttagcagggagtaagaatacccctgaacccataatattccccgataccattaaggtgacggggattaggcccactttgtgagcatcagcatccgaagacataatttggactcctgaaaaggtgacttcgttacgataaattacgtcgtatcataccccctcagaatgccgctgaattatgtcggagacgggttatcgccaatgctgctattatcgtgtcttatcgttgagtgtagaaaaattaggcagccgatcgttcccgatgttggctaacataatgcaggggggtcataccataaaactctttaaacacggaaataaagtacgatgtgctgttatacccacacagctgtgagacttgagagatattctttccgtccattaataattggtttacggcataacgcattcggcaggtcgtgattatttggctataactggtattctcgtttttgagctttttctttaacaagcttggactcaggcacaggcaactggcaacggcgctcagattccagtctttatgaatatcgctctgaatgatgtggtaaacgctgtcactgatgcggctgcgcagcatgtgcattaacaaagaaataaattttttgtggtcaagaaagcgggataaaacggtgaaaaggagcgcacgggtacgttcactaacaatttcatccggtgcttccatcgcgctgtagcgggcggcgaccctgaagatatccggcgtcagacagttggcggtcaataagggatcggcgttgcgttgccagacgggaaggtgtgagagatctttattcaggaattgtaaatagtctttaatattattgcgactcacttgtattactagcacgctatttaatgatgaaatgtcaataacgttattttcacaagccagaatggccatatgattcgcttttaagctgattggctccttaccatttactcgtaaccatgtatctttttcggttaataacactatgcaaggttcgttgctgcaaatcctcatacccgaactcctggaatatgaacataaaagaccggatctcgccaaacgggagagataacggggactgagtcaattgtgtgatgaattgaaactgcactaaaataactttcctgaataatattacaatatttgtacgatgaattagggtgtacaaaaagttgtacgcgagtggaaacttgtcatttttgtataaaaaaagcgcgggatggggcccgcgcaaaaaggtatgacagtattattgttttgcagcaatactcagggaatacatgccatcctcaaaaaaaagactctttgtgattaggctttcacgcacataacgtgatatacgccatcaataatttccgtgccttcggtttcatgctcaaagccagggaagtgatgatcccaggattgcagtgagcgtaagtaacccacctgcggactgttttcatcgccaaagttttcgccggagagcagcatcgggatgcctggcgggtaaggaataacggagttcgccgcaatgcgacccggtagattttcaatcgccaccatttcaatattgttgttcacaatcgcgttgtaggcgtcgcgcggggtaatctccgcaaccggcagggtggaataggcggcgttgagacgggcgcccgggttattttcacgtagccaggcaaacattttatcgcccaggtcatgaatacccatgttcgcgtaagtgtcaggataatcctgcaccagttccggcatcacctgcgccagcggcgtattcgcgtcgtaatgatgtttgaaggagcacagcgtgttgatcagcgttccccatttcccgcgagttacccccatagagaacaggaacataatctgaaagtcggtggtgcgggtcggcacgataccgtggcggccaagccatgctgtgaccagcgcagcaggtacgccggatgcttccagttcgccatcgtcgcccatacccggcgccaggatactgactttaatcgggtccagcatactccagttatccggcaggtctttaaagccgtgccaggtttccccggggcgcatgacccagcagttctggtcagtggctagcagttttgccggcgcgtcggcgaagtcatacgttttaccggtttgtggatcggtgacgacgtccttattccacggtttaaagaaccagtcgccttcatcggtaaactctttataaagacgcgccatcgcctgacggaaatcaaccgcttcgtcaatcacctcttgagtcagggacaggccgctgttaccgtccatcatcgataccgccacatcgttggatgcgcagatggcatataacggagaggtggtggcatgcatcatataggcctggttgaagcgggagaaattcaccgcgccacggccttcacggacgtgaatgtaggaagcttgtgaaagcgcattcagtagtttgtgcgtggagtgggtggcaaacacggtcggaccgttatggtcgcctggctcgccgcgcatcgcgtagtgatcgcaataaatcgggttgaagcgcgcatagccgtaccatgcttcgtcgaagtgaatgcgatcgctggtttttgccagcagatcctgcgcctctttggcgttatagcatacgccgtcataggtacagttggtcactacgctgtaagacggtttctgtccggctttagttttggtcagcgggctggcgctgatttttttctgcaaggtttcaggctgcatttcctgcgggtagattggcccaataatgccgtaacggttacggcttggcaccatatataccggtttggccccagtgaggatcagcccctgctcgatggatttatggcagttacgatccagtacaacgacatcattatccgtcatacaggcctgcataatagtacggttagaacctgaggtcccgacaactacggaccaggagcggtcagcaccgaatacgcgggcggcgtttttctcgctttcgccaaacgcgccggtatggtcgaggagtgaaccgagcgtggtacgctcaatccccatatcgctgcggaacaggttttcgccataataatcgtgataaaagcgaccggaaggcgttttagtgaaaccgacgccgccctggtgtcccggcgccgcccatgaatattcatgaatgtcgctgtatttcatcaacgcgttaaacagcggcggtaacagttgctggcgataccgggtcatggcggcaacggcgcgtccggcgataaagtcagcggtgtcttccagaatccaggcgaattcatcgacaagctccagcaggtcgcggtccagcgatgccgtcgctttttccctgtcgcctaacaggaaaacgggcacgttttgctgacgctcgtgaagcttaccgatcaattgcctgacgctcaggtgctcatccggttgttccatttggtagctaaacatcagacagtcaatggcttcgttcgcggacaagatggcatagccgtcatcgaaggatgtcgatttaatgacggtaacattttgttggctcaaggcatctgccagacgctcaaccgcgttgccaacccaggtgtcctgatgcagaaactcactttcaacaattaatactttcatcatcttttacccggttgtggaggccgtgcaatttacgccttgccgacccgccgtatgaatgtgacgtgggcaagtattaccccgtcaaatagggggtgtaaagtgatggaataatggtcggttattgatattattgtttaataaacaatgggttaattattgatattgagcgatttcacctgccgtttatcgacaggtgaattatttttttggctgatagtggtatccggctttagccgggcatcgtctggcgtcgttgctgacttagcttgcggtattgttgcggcgacataccgacaaatttgctaaaagtactgtaaaaacggctgctggatcggaacccggcagtcagagcgacatcgaggatcgttttgtcagtatcgctcaataaggcacgtacgtgattgatgcgcatcgccgtgatgtactgcttcatcgtcaattgcataacccgctggaatattcccatcgcgtaattagcattgagtttgacatgctccgcgacgtcgttaatggtgagcgcctgatcgtagttatcggcaataaatcccagcatctggcttacgtaaaactgcgcatggcgtgagacgctattcttgtgggtgcgtgatgttttattgagcaaaatgggttgccagccggaaaggctaaagcgtttaagcatcaggccgatttcatcgatcgccaactggcgaatttgctcattcgggctgcttgtttcctgctgccagcgcaacacttcaaaggtgctaagctgctgggtcgccagtgatttaaccaccatcccgtgcgtgacgtggttgataagatcgcgatccagcggccaggagagaaacaggtgcatcggcaaactgaaaatcgccatctggcggcagttgccggggcgggtaagctggtgtggcgtacaggcccaaaacagggtgatatgcccctgctttatctgcacgacttcattgttgattaaatactccacatcgccgtcaaacggaacattcacttctacttgcccatgccagtgactgctggccattctgtgcggcggcctcagttcaacgtccagtcgttgatattcggaatagagcgacagcgggctacgggtttgcttttcatcgccgttgcacatgtgcgggtcgggcgggaggagggatattgcttgcgtactcatcgtcactccatttcctgaattatcagaattatgcccctttagccgggaggaaaccgggaatccggacacagaatccgtcgatattgtagagcgtagcctgactatcaggccgaatactctgctttttacgccattttgtcccaaaaactcagatctcccgcgcgccagcatacgatctgagttttcgggaatgctcatcggggaagacggaggttttcaccgggaacgcgtgccaccatgaaggtgttcactactgttctggagagtcatgatgacggcacccaaaattacctttatcggcgcaggttctacgattttcgtcaaaaatatcctcggcgatgtgtttcaccgcgaggcgctaaagtcagcgcatgtcgccctgatggatattgacgaaacccggctggaagagtcgcacattgtggtacggaaactgatggactcagcgggcgcttctggccggattacctgccataccaaccagaaagcggcgctacaggatgcggatttcgtggtggtcgcctttcagattggcggctatgaaccctgcaccgtgaccgattttgaggtttgtaagcgtcatggcctggaacagacgatcgccgatacgctggggccgggcggcatcatgcgcgcgctgcggaccatcccgcatctgtggcggatttgcgaagacatgacggaagtctgtccgaaggccaccatgctcaattacgtcaacccgatggcgatgaatacctgggcgatgtatgcccgttatccgcatatcaaacaggtcggcctgtgccattcggtacagggaacggcggaagaactggcgcgcgacctgaatatcgatcccacctcgctgcgctaccgctgcgccggcattaaccacatggcgttttacctcgaactggagcgcaaaacggctgacgggacttatgtcaatctctatcctgaattgctggcggcctatgacgccggacaggcgccgaagcccaatattcacggcaatgaacgctgccagaacatcgtgcgctatgagatgttcaaaaagttgggctacttcgtcactgagtcatcagagcattttgccgagtacacgccgtggtttattaaaccgggacgcgaggatctgattgcgcgctacaaggtgccgctggatgaatatccgaaacgctgcgtagaacaactggcgaactggcataaagagctggaggagtataaaaccgccgagcgtatcgacatcaaaccgtcccgcgagtacgccagcaccattatgaacgctctgtggaccggcgagccgagcgtgatttacggcaatgtgcgtaacgaggggctgattgataacctgccgcagggaagctgcgtggaagtggcttgtctggtggatgccaacggcattcaaccgacgaaggtggggacgatcccttcccatctggcggcgatgatgcagaccaacatcaacgtgcaaacgctgttgaccgaagccatcctcacggaaaaccgcgatcgcgtgtatcacgcggcgatgatggaccctcataccgcagcggtgctgggtatcgaagaaatctatgcgttggttgacgatctgatcgccgcgcatggcgactggcttccggcctggttacgccgttaatctccagccgcgctggacggcagatccggcgtttaacctctactaacagaaggcgggcgctggtaacagcgacccggtaccctatgagcatctctctgacaacaaagctgagttacgggttcggtgcgtttggtaaggatttcgccatcggcattgtgtatatgtacctgatgtattactacaccgatgtggtgggactttcggtcggcctcgtcggcaccctctttctggtcgcgcgaatctgggatgcgataaacgatcccatcatgggctggattgtcaacgccacgcgttcgcggtgggggaaatttaagccgtggatattgatcggcaccttaaccaattcgctggtgcttttcctgctgttcagcgcccatctttttgagggaaccgcgcaggttgtatttgtctgcgtaacctacatcctgtggggcatgacgtataccattatggatatcccattttggtcgctggtaccgactattacgcttgataagcgagaacgcgaacaactggtgccgttcccgcgtttcttcgccagtctggctggcttcgtcactgccggtataacgctgccgtttgtgagctatgttggcggggcggatcgtgggttcggctttcagatgtttacgctggtactgattgcgttctttatcgcctcgactatcgtgacattacgcaacgtacatgaggtgtactcctccgacaacggtgtaacggcaggccgcccacatctgacgttaaaaacgatcgttggattgatatacaaaaacgatcagctctcttgcctgttgggaatggcgctggcgtataacattgcctccaatattatcaatggctttgcgatctactacttcacctatgtgattggcgatgccgatctttttccctattacctttcttacgccggcgcggcgaatctgctgacgctgattgtcttcccccggctggtgaaaatgttatcgcggcggatattgtgggcgggcgcctccgtgatgcccgttctgagttgcgcagggctcttcgcgatggcgttggcggatatccataatgccgctttaatcgtggcggcgggtattttcctgaatatcgggaccgcgctcttttgggtgcttcaggtgatcatggtggcggatacggtcgattatggggaatttaagctcaatattcgctgcgagagtatcgcttattccgtacagacgatggttgtgaagggcggctcggcgtttgcggcgttctttatcgctctggtgctggggctgattggctacacgccgaacgtggcgcagtctgcgcaaaccctgcaggggatgcagtttattatgattgtcctgccggtactgtttttcatgatgacgttggttctctacttccgctactaccgtttgaacggcgatatgctgcgcaagattcagatccacctgctggataaataccggaaaacgccgccattcgtcgaacagccggatagcccggcgatttctgtggtagcgaccagcgatgtaaaagcgtgagcatggtctctcgtgcaggccggataagccggataagcgtagcgccatccggcaattaaccgataacgcggcccgggagaacgccgggcctgccaggttatttcgcgcagttagcgcactgtttgctgacaatctgctggaagaaatcgttgcctttgtcatccaccaggataaaggccgggaaatcttctacttcaattttccagatagcttccatgccgagttccggatactcgacgcactccagatgcttaatgctctgctgtgccagtaccgccgccgggccgccgatactgcccaaataaaagccgccatgttttttacaggcatccgtgacctgctgactacggttgcctttcgccagcatgatcatactgccgccgtgggattgcagcagatcgacataagagtccattcggcctgcggtggtggggcctaatgagccagatggataacctgccggggtttttgccggacctgcgtaatagatgggatggtctttaatatactgcggcaggtcttcgccggattcaatacgctcttttagcttcgcgtgggcgatatcgcgacctacgataatggtgcccgtcagcgacagacgagtcgagaccgggtactgcgatagctgggcgaggatctctttcatcggacggttgagatcgactttcaccgcgtcgccttcgcccgcctgacgcagcgctggcggaatatactggcccggattgtgttccagtttttcgatccagatgccttcgcggttgattttcgctttgatgttacggtcggccgagcaggagacgcccatccccaccggacaggaagcgccgtgacgcggcaggcgaattacgcgaatatcgtgggcgaaatatttcccgccgaactgggcgccgaggccaagtttttgcgcttcttccaacagttcctgttccaggtggggatcgcggaatgcctggccgtgctcgttaccttccgccggcagcgcgtcgtaatagtgggtgctggcgagcttaacggttttcagcgtgctttccgccgaggtgccgccaatgacaaaggcgatatggtatggcggacaggccgcggtgcccagcgtgcgcattttctcaacgaggaagtttttcagcttgcctggggtgagcagcgctttggtctcctgatagagatacgttttgtttgctgaaccgccgcctttcgccacgcaaaggaacttgtactcgtcgccatcgacggcatagagatcgatttgcgctggcaggttgctgccggtattgacctctttgtacatattcagcggcgcgttctgcgagtagcgcaggttatcttcgatataggtattaaacacgcctttggagagcgcggcttcatcaccgccgcccgtccagacgcgttggccttttttacccatgataatcgccgtgccggtatcctggcaggtcggcagaatgcctttggcggcgatctcggagtttctcaggaattgcaacgccacatatttgtcgttttcgctggcttcggggtcatggagaatggcggcgacttgctgctggtgttcaggacggagcataaaagacgcatcatggaaggcctgttgagccagcaacgttaacgcctgcggctcaacgttgaggatagattctccattgaattcactgacgctgacataatcggaggtgagcagataatactctgttttgtcctctcccatcgggaaaggcgcctgatagataaactcttttttcgacatgtgcttccagcctaatagtaagaaaatgtattaagaacctcatgggccaggctctaagtcgcgcgccgcgcataaccgggcggcgcgcgcggccattacaggaatccgtacattgcggcaaagatccagccaaagacgcaggagacgctcacgccaatcaaacccggcagaatgaagctgtggttaatgacgaagcggccaatacgggttgtgccggaacggtcaaactgaatcgccgccagatcgcttgggtaggtcggcaggatatagtagccataacatgccggcgcagaggccacgatatacgccggatcgacaccgatagccagcgcgacgggaacaatcgccgccagcgccgctgcctgggagttaacaaacttggagaccagcagcagaacgatggcgtaggcccacggatactctttgaccatttcgcccagcacgccctgaatttccgacatatgcgcgccgaacatggtttccgccatccaggcgatcccgtataccgcgacaatcgcaatcataccggaacgaaaaacttcgttttttgagatagacgcaggattggttttggtcaggatgataatgagcgccccggtcagcagcataaacatctgaatgaccagcaccatcgacaacggtttgccgccgaaggttggacgtaagtcggagtccgcgcccaggagagcgaccacggcaatcgccgccaggaagatccacatcgccagccagttgcttttcggcagttttttatccagcagcgtcgcggtatcgccgtacacgtactgacggttttccggtacggaaataaatttctgaaacgcttcgtctttatccagatctttaccgcggaaccaactaaaaataccgattgccaggataccgagcagggtagacgggatggtgatcgacagcagatcgaggaactccagatgttttccgtcaaatgtcacgttgcccagcatcgctaccagagaaaccacggcgacggaaaccggactggcgatgatgcccatttgcgcgccgatagaactggccgccattggacgttccggacggatattattcttgatcgccacgtcatagataatcggcaaaatggtgtagaccacgtggcctgtcccacacagaatcgtcagggtacaggtgacgaacggcgccacaatagagacgtatttggggttgcgacgcagcagcttttcggcaatctgcagcatcacatccagcccgcctgacgcctgcaacgtcgccgacgcggcgactaccgcgataatgaccagcattacgtcaacgggcggtttgcctggctggagatggaaaacaaacaccagaatgaccagaccgataccgcccaacaacccgagcgcgatcccgccctttcgggcaccataaaacagacatattaatattatgagaagctgtatactaaataacatttttatttatcctcgcgataaacccagtcaattttgataaatggatcacagccatcttctgatttttgtgaatgagcatcaggaaatggcgaatattcaatgcgccagtggcgacgattaacgattaagctttttacagagttgctttaagtaattattttcttgcgatggtgatgttcagaggggagtaccctctggcgatgggcaggtggagtcagcgagagcagtaaattatgatttgtctgttttaaaaacaggcgtttattatttgatttttgtgtctcgccatcaggtaaatcacgagataaatcgaacagcatgtgacttatgtgatcattgtcacgccatttttttaaattattagtatggcgtgtggagacgcgtatctgctcaccaatatacgtattgtccataggcgtagcacaagctccattgctacaaacataattttatttaagtgtcaggaaaattccggacaaatcccttttttaataaaaatacacactctcggcatgggataatacttaattaacttttgttagcgttttgaaattaaaaacagcgcagagcgctgtaataatagaaaataacgttaacaggcctggggtgagtatatttgatctgacacaatttcccaggtttgttattaatgtgatagcgtttttattggcattgttataataaatgttaccaggatataacgcttcgcgtcggctttatgcggtatccttactgacaatattgtttcagtaaagagtaatgttccggctgaacgcggtagcggtaaaccggcctgccggtcacgccgtaatgaatactggtaaacaagatatggcaatttaccagccagatgagatatttacggcaggagacgcgtgagatattcacttcgttggccaactcgtcggtagaaaattcctgctcctgatgcgcatcaatccactggcataaggtgcgtagcgtttgctgcgtcagcccttttggtagccgacgaggctcctgctcgctggatgaattaccgtgaatgagcaggtcaagctcagactgttcgtaatactggcgtttttccatcgccgttttcttacgtagccaaccggtcaacgcttcttcaaagcgcgtggcctgaaaaggcttgatcagataatccaccacgccgtagtgaagcgaatctttaatggtggcggcgtcagcggcagaagaaatgacaataacgtcgcttttgcagcctgcgctgtgcaggacaggcagcagatccaatccgttttcctgctgcatatagatatccagcaggattaggtcaatgtgattttcactgttgaagataaactctttcgctttttccagcgtcgaagcggttccacaacaatgaaaaccggagatttgcgcgacatagcggcgatttaactccgcgaccatcgcatcgtcatcgacaattaatacattgatcataggctggtcctttttccatcccagggtaactgtacaaaaaattgtgtgaagatcccaggctcggactccacggaaattacgccgccaagcgcttcaacctgctgtttaaccagcgctaaaccgacgccgcgttcggcgcctttcgacgagacgcctttttcaaaaatcgcctcgatgcgctcaggttcgatacccggaccgtcatcgctcacttcgcaatgcagccagccatgacggtagtgtaacgagacgctgatttcgccgccggattcctggctcaacgcttccagcgcgttttcaatcaaattacccagcgccgtaatcagcaccgtaacctgatcttcattgttattatccggtaactggctgtcgctgcttatcaccaggctgtgcccgaaatcagaggcgcgggtaatcttactgagcaaaaagccagcgataatcggcgactttattttacccagcagcaaaccgatctcttcctgatagttattggccgtcttgataatatacgcttcaagctgcttataactcttcaggtgcaataatcccagaatcacatgtaatttgttcatgaattcgtgggatcgttcacggagcgcatccgcgtagttcaccatcccgtccaaccgctgcatcagttggcgaacttctgttttatccctgaaggtggatatcgcgccgataatttcgccattgctgcgcaccggaacggtattcaccagcagcaggcggcctttgacgatgatctcttcatcgcggcgcggcgtaccgtcacgcaacacttcgctaatgtccaccacctgcgaccaggcatgactcagggtggataatctggcgtcatcctgcgtttttcgataatcgagcagcgcctgcgccgcatggttaatcaacgtgacttcgccgctatcatccacggcgataacgccctctttgattgactgcagcatcgcctggcgttgttcaaacagggttgagatctcatagggttcgaggccaaacaggatacgtttcagcaccttgaccagcgcatacgtgcctaataaccccaccagagcgccgaacagaatggaccagataatactgccgcggctattgttgatctgctgcgtaacgtgactgagttccaggccaatcgctaccacgccgatctgccggtggtgttcatcataaaccggtgtgaaaacgcgcagcgctttggcaagaaagccgcgattaatggcaacgttttcctttccctgcagcgcgagcagaatgtcatcgcctttgaacggttggccgattcgctgcgtttctgggtgcgaataacggatgccctgcatgttggtcaccacaataaacaaaaagccattatgctggctcaccgcttcggcgagcgtctgaatgccgctttccgcaggcggttttttcagcccctcgcgaactgccggagagtccgccagcgagcgagccaccgccagcgctttatctgccagcgcgtcgcgcgtcatgctgctgatttgcgaaaaatagatcagatggaccacaacgagcaccgaaaacaaaacggcgctgaccatcagaatgacggtagtgccgagtttcatggggcgtttgcgtaacgcccggcatggcagggagtgtttcatagtggacctgagcggacgaatcgtaaggttattatccctgatgaggcgtctaattcaaaggcataggcgatgttgctccagtgttgaaaagcccgtcttgccttgcagggcgcgctacctgctcatgtcgttaattaatatcgccggataccgtgatgggtaatttattttcatcagaattacataaaataatttttcattaatttttataataacgtatgcggtatcacattttatttttactgacgttcagaatgcgtttgatcacaatcaatcagcgctaatatttaatctattatgattagttttcattacatattattaataattatggaagcaatgtgagaaataaaaaatggaaataaaaaaatggctgaacacaaccataacccgacgtgatgctattgtcgctactgcaaaagtaggggcggcggtgacgctaagccaggcgattacgctgccttttgctaccactgcccaggcgcaggataccccgataccgaaggatgccaacggcgaaaccgtcaggcacagcgcctgtctggtcaactgtggcagtcgatgcccgcttaaggttatcgtgaaaaatgatcgcattgtgcgtattgagccggaagacgcgaaagatgacgcggtattcggcgagcatcagattcgtccctgcctgcgcgggcgttccagtcgctggcgggtctatagcccggatcgcattaagtatccgatgaaaagagtgggaaaacgcggcgaaggaaaatttaaacgtatttcatgggatgaggccacggcctttattgcggcggaattaacgcgtgttagcgaaaaatatggccgggaagctatttattataattatcaatccggcgcgtattatcacacgcagggtagacccgcctggataagattactaaatctcaccggcggttatttaaattatcacaacacctattccacggcgcaaatcgccaccgccacgccttatacccacggtgattatgtcggtagccattttacgcagatcgcgcattccgatctggtggtgctatttggcctgaatctctcagaaacgcggatgtccggcggcggccaggttgaagagctgcgccgggcgctggagacctcgaaagcccgggtcattattatcgatccgcgctataccgattcggtgattaccgaacacgccgaatggctaccgattcgcccaaccacggacgccgcgctagtcgccggcatagcgcatacgctgattaccgaacagcttctcgacgaggcgctggtaaaccgctattgcgtcggctatgaccgtagcaccttgccggacacggctgcgcctaacgccagctataaagattatgttcttggcacgggcgatgacggtatcgcgaaaaccccggaatgggcggcggatatcaccggtattccggcaacgcgtattcgccaactggcgcgcgaaatcgcctcggcgcgcgcctgctatatttgccagggctgggggccgcagcgtcatgccaacggcgaacaaaccgtgcgtgctattcagacgctgccagcgttaacaggccacttcgggcggcccggcaccaacaatggcaactggccttacggtacgccgtatggcgtgccattgttgcctgtcggtaagaatccgatcacaacctctattccttgctatctgtggacggacgccattcagcatccggagaaaatgaccgcgacgacaatgggtgtgaaaggcgcggacaggctaaaaaccggaattaagctgtttttcaaccaggccggtaatactttgcttaatcagcacggcgaaacaaaccgcacccgtcaaattctcgcggatgaatcgctgtgtgaaaccattatcgtgattgaaaaccatatgacgcccagcgcgatgtatgcggatctgctgttgccggagaccagctatcttgaggcggaagacctggtggacagctcctatgcggcgggatcgcataactacatgattgcgattcagaaaaccgttaaaccgatgtgggaagtgcgcagcacgtatgacatctgcgcggatatcgccgggcatcttggactgcgcgagcaatataccgagggccgaactcaggcgcagtgggcggagatgcactatcagcagatccgtgaaaaacgtccatacctaccggagtggagcgtggcgaaagagatgggtgtgattgaccagcgtatcgctaccgagcagcagagccttgcgtttgccgatttccgcgccgacgccgaggctaatccactctccacgccgtcgggcaaaattgaaatttactcccaggcgctggcggatctggcgcaaacgtggactttgccagaaggcgagcgaattcccgcattgccggaattttgtccggcgaaagagtcgcaccttaacaaagcattgacggcgaagtatccgttgcagttaagcggcttccataccaaagggcatacccactcgacctacagcaatgtgctgatgctgcatgaggcggtgccggatgaagtctggattaacccgattgacgccagcgctcgccaattgaagtccggcgatcgggtgcatgtattcaatgaccgcggcgtggtggagcttccctgtaaagtgacccagcgcattttacccggcgtggcggcgatgccgcagggcgcgtggacgcggcttgacggcaacggcgttgatgtcggcggctgtatcaatacgctgaccagccaccacccttcgccgctggcgaaaggcaatccgcagcataccaatctggttgaaattaaacgcgcttaaggagtgatgtacgatgaaacagtatggcttttatgttgactcctcgcgctgttcaggctgtaaaacctgccaggtaagctgcaaggataataaagatctggatgtcggtccgaaactgcgccgcgtctatgaatatggcggcggaagctgggtgaaagagggggaaagctggcatcacgacacctttacctactacctctctattgcttgtaaccattgcgatgagccggtatgtgtctccggctgtccgaccggggcgatgcataaacgcaaagaagatggtctggtcgtggtggatgacagcgtatgcgtcggctgtcgttattgtgaaatgcgctgcccctacggcgcgccgcagtttgatacgcaggcgaacgtgatgcgtaagtgcgacggttgtcttgaccgactggagaacaatctgcgccctatttgtgtggattcttgcccgcagcgagcgctggatttcggccctgtcgatgaattacgggcaaaatatggcacggagaatcaaatcgcgccgctaccttcggcgtcgttcacccatcctaacctcattattaaaccgcatccgaaagcgagacccacgggcgatacggaaggcgcaatcatgaacattcgggaggtgcgccatgcatgagttaccgctggtcttttttacggtctttacccagagcgcggtcggcgcgtttattctgctgctgattggcggcgcaatggggctggtcgcgccgcggcgtaaggctatcggtctgttctcggtgatgtgcctgtttgggctgggcgtcattgtcggcaccttccacgtcgggcaaccgctgcgtgcgctgaatatgctgctgcgcgtcggacattcgccgatgagtaacgagattgtcctgtcggcggcttttgcggcgctcggcgggctgggggcgctcggtttgttgctgaaccgggcgacgccgctgtgtaacgcgttggtctggttggcggcgatagtcggagtagtcttcttatacgccgttccgcagatttaccaactgccgacggtggcgacctggcgttcatcttacaccacggcaatgatgatattgacgccgttgattggcggcggcgcgttggcggcattgtttggcgtgcgccgtctggggctactggtcagcgtgttggcgattttggtgagcttttgtctgcgcccgggctatatggcgacgctgatgagcgccgatagcgctctgaccgccgcgcagcatagctggtttaccgcccaggcgatattgctggcggcgggcgtggtcggggtggtggtctgcgcgcgcctgaaatcgagcgctgcggtgctggccatgacggctgtggtggttatcgcggcggagttggcgggtaggattgcgttttacaatctgtggacgctgccaatgtagttttttgcccggtttatgccatgtaagcctgatcagcgtagcgtcatcaggcgaaatatttcaggagctattgctatgctttcccgtgctgttttgccgcgtatcctcggcgcactgttttactactcccctgagaggccggaggtgaaagcgttgttcgattgtttgccaacgttgcctgagctttacccctggcgcgatcgtggatctattgaatcactgtgtgcgtcatggtcgctaccggatgatgatgcgcttacatggcaattttccgtattgtttgaaggccagggaaagatgcccgtcccgccctggggatcggtctatctggaaaaagataatttgctgatgggggaaaccaccgccgattatcgagcttttttacagtcgcagggcatggtattcactgaccgtgaacgcgagccggaagatcagtttggcctgatgctattggcctgtagcgatctgctggcacgaggcgacaacgtggcggccaaccggttactggaggcgcatctgctgccctggggattccgctatctggaattgctgcaacgcaataccgttagcgccttctatgcccggcttgccgtcgtagcgacctgttatctgcaggatgttcagcagcaacagggactacagcctgagaataagcggttgtttttctgaggtattggtcgggttttgatggcgtgccgtaatacttgtgccgccatcgtgcccgctgttgcgtcagcgggcacagtttactattacagctccggcgtctttttgaaaccggtcagcatcagcaccaggctctgttttgagtccgctggcgtgaagtcgtagtgatttccctgacggtcgccgccgatataccaggatatttccgttttcccttccgccagcgctttgcgcaccgctttatcgacatcaaccatgcgatactcatgtgaatggtccagatataacacggcatcggaacggtagttgatcgccggtttattgttccaggacacggtactgacgtgccagtcactgctggtcgggtaaaagaaaatttgatcggcgccgttcgcttccgttttgccgccaaaaaggcgaatacggtatttgaatagcgaagcgtccatattggcaggcaggggcgggatcttaaatttcaccagcgtgagcgtttccgggtgctgcgtgcgtccgccatttgtccagtcatcctgtacgtacaaggtatcgacgctggcatgaggcttgtcgtcttcgctgcttacccaggtattttcttccgctttactgtaggcgtaaggaaccgtagtgccgcaatccagtccctggttcatacacagatccgtcataaactgcgcgccatcttccgtccagccattcataaaatcggcatgggcggtataaagacttccccagcgctcttcccgggtttcgccatgcattaccgggtccatcgacaattccactttggacgtatccagcgaggagatctgcgggagtacccaggcgatgttcatattcaccgttgggattttgaccggatagtctgcggaacatttcccgtggtcggcatagatagcgttattgtggctatgggttggtttcaggttgacgccatcccaacagttggggaaagcgatcccgatattaaactggacggcatcgcccgctttacgcaggccgcatatttcgcctaccttgttggtgtaacctttgccgttggcacataaaaaggtgattgcggaactggggccagtaccgtgatgatcgcctgccagtaactccagcccggccgggaatggatggagcggatattgcgctacatttgtggattgataataggtcttttggtaggccggatttacgatttcaccatcaggtaatttcatggacggcgcccagtaagcggagctgtcggctttattatcacaggtggtatcgggttgcgcgcgcaacgtctggtaggtagagaccgcatcggtgtgggtgttgccaaaaaagtcatgccacatcgcctgattcgctttaccaaacatcataatcgcgtcatcgcccagcgtgtggtgatagccgcacacgacatgcgcctgaggaccggcatgggccgggaatgcgccagcggcaacgagcgtagccaggctgacggtaataaggttgagtttcatttttttgctgcccggttgaatagaagtgggagcagcaatagcagatcaaattgcggtgttacatctcattaattatcactttttgtcatttgccctgcatacaggggcgaatttgcagacgtactatttaaataattagccgaaactaccctcctcttgattatgtcaatttacaaaaagggtacgttagtgattaaaatcgggctttttgtgataaccctcactatttcattttgcctatgctaatggcgctcgccataaccgaataacgattctatcggacatcggctttatttttaagaaatgcgttacgacatcagtcgtgacgcgatctgctatggattttttatgagattactaaaacgcgttattgtggttgtactcttgggcgtgattttatttatggtcagggacgatatacgctatgtttatcaactgatcctcaaatatggtgataaaccctcggcgctggcactgagtagctataaagcggttattcagcaaaaaccagtcgcaggagttaagagtaacctttcaggtttgacctactccgccgaagacaggatgcttttcgccgttattaataatccccctgaactggtctggttaacgacagaagggcagctggtaggacggatgccgctgcagggcatccacgacccggagtctattgcatggagtgggggcaaccagttccagataggcagtgagaaagatggcgcggtctataaaacacaggtggatattcagcgcggcaccatgcagataatctccatggtgaagcttgagggctatgacaaagcaaaaaataaagggctggaaggtacggcatgggatgcgaaaaatgagagattatatgccgcaaaagaaagaaaacccattatgatcaaagaagtagagatgagcaaaaatggtatcaccagagcgttgccttctgccatcactgcgagtgtgagcgatgtctccggacttgaataccatgccccaacggattcgctgctggtgttgtcggacgagtcaaaaatgattcttgaggtcagttccgagtggcgggtgcgcgatcgattgttcctgacggcggagtggtcagggctcagagacgatatcccccagccagaagggattgccatggataatgaaaataatttgtatattgtgagtgaaccaaatctgttttataaattttcgtgtgatatacagaatgactaaaatctatttttactgtcacagtatgctaaaacagaacaaggttattaataccatgatttgacgactgtttgattcgttgattcattgttggggatatttatgttttacttacctcagtaacggattactttgtggtgtagcgtaacggtaattgtcctcctcatatttgcggcagcgtagtctgccgctttttttgtctatggaaaacccccagctaggctgggggttccggaaagctttcagctttaagccagttattaaaaccccttttgatttgttaaaacatcttgcggtctggcaactgcaaaagttcaacaagaaatcaaaagggggtcccaatgggggacgaaaagagcttagcgcacacccgatggaactgtaaatatcacatagttttcgcgcccaaataccgaagacaagcgttctatggagagaagcgtagggcagtaggcagcatattaagaaaattgtgtgaatggaaaaacgtacgaattctggaagcagaatgttgtgcagatcatattcacatgcttctggagatcccgccgaagatgagtgtgtcgagtttcatgggatatctgaagggtaaaagtagtctgatgctttacgagcagtttggggatctaaaattcaaatacaggaacagggagttctggtgcagagggtactatgtcgatacggtgggtaagaacacggcgaagatacaggactacataaagcaccagcttgaagaggataaaatgggtgagcaattatcgatcccgtatccgggcagcccgtttacgggccgtaagtaacgaagtttgatgcaaatgtcagatcgtatgcgcctgttagggcgcggctggtaagagagccttataggcgcatctgaaaaacctccggctatgccggaggatatttattttataaattaactctctctgtaataattaacagacaatgaatattattctgttttttcagcaggcctccgaagagacctcgcatggtgatgtttagttatcaggcatgattttcttcatcaacacttaccgaatgccatgtcgcctcgctaagcgaaatcatttcatctacgccggaactcttgttaaccgggtttttcgtcggcgatgtgcctgtaaatgttccactggcggtatagtccgtatcgttgaccgtgaccttcacctgaatatcctgatgcgcctccacgactcccttaagggtgacggtgttatccagactgctaacagtcgatcccaacgttggttcggcggacggttgtgtatccatagtcagcttaattgttgcgtgagcttctaagcgacccgataaaggtcggtgtattgatgttagtgatattatcgcctccggcgccgatatcactattatcctccatggaacgtactggcggtgtagagtctatcgtcagccagccgatagacagcgaagaattatccatagcgtttgcggaacgatctctgaagatgatatccagagttgccttgcctaccactctaccaacattttaggaaaaattacgtaatatcgactgatatgtaaaactcattcagcatcaaatggattaattcaacatcagtagtaatatccatttttttataggctgatctcttttgtgttgaaatcgtttttatatttcgatctaataaatttgagcaacttttaacagataatcctgctgccacgtaataaataacttttttttcgctcaatgttaggtcgaattttttagcgagcaacagaatcccatctcttatattaatatgttttgctttgttcttatactgcattgtcagatatctcaattaacatattgatgacgagaggaagataaaaacgctaaaaattccgatggtgtagttttgaaatgttttttaaaaacgcatgtaaaataagaagcactatcataaccacacatataagccactcgagtaatattatattcactattgcgtggaagttttgtcgctttattcattcgcgcattaaggtaaacttcgctgaatgaggtgtgctcttgtttcaatttcctttttaatgtggaacaactcatatagagtgagtcagaaatatccttgagcgcccattttcgacttatgtcgcttataataatattatagatgttttcggctaatgtattttgcgatagttctctgaagagagcaaatgcttcaggttcatagatgaactctgaaagcagaaatcttattaaatattcctttttatcttgggataatttctggcttttatttgaagagtgtaagaggttgaatactcttgctacgcctgtttctattggcgctaacagatgttttgtcgtcggttttgttaatggggccgaaaagtctgcatgttcatacagaaaaaaattataagcattttttattgacgctgaatctaattcaattaaattataatttaactgttcatgagtctcttccatagtgatatgaatggtttgatctttagctaaaaatattaacattggccctgatgccgtaatatactccccggacgatgtcgtaattgaaattttacccgtggtgagcttgatgagtacggactgcagtaaatttaatccctgaagtgataaggatttcctctgccagttttgcgctgattgtaaacattcaatgctccccacctggacaggtgagggattaaatacttttagcatgataatttccttttattaaatgtgcgtgtaaatcaaaattattctgaaaaatatttcaaaagaaaactaatatatagctatataattatttgcgaacttaaggtatcaggtggcgatcttttcattttctatggaaaatgctattttatattgcatttctacatattatagtatcgttaaaaaactatgtcgcgtataaaaaaaagatggaaatttacaagaattggctcatgttattatcaatttatctctttaaaatttgaattaagtaataattgcctttaatcttttagagaatagctctttaatttcatggaggtagttagcatgaggtataagatctgatgttaatttgtgataaggtttatcctggatgtaaatattaacgctctcggccaggaaaggcatacaacgcggtaaatatatactgcggcgggtagacggtgtagcgatatccggaagtttgaggggaggggaagcattcaatcgtatggttggctttatgaaaaacggtgtaacacgttagtgaggttcttactgtgcgtatccgttaggtttatgctttctgattatataatgttgcgtgttttggcacggcagtattgaatcttttgctgcgtcggccccgaggaggaatcactcacagcgaatgccagcgcacagcctggtcctgaatctctaaatgagtagaaaacctttcggtttgatactccggttctattccttctaaatttatcgtaatgacatctgcgttacgcgtgttgtatgcttaatatccacagaagtacaagaggacaacactatgccagccgcaaacagtatggcgatgaaacgcgaaaccctgaacctgcgtatcaaacccgccgagcgcgatcttatcgatcgagcggcgaaagccagagggaaaaaccgcacagactttgtgctggaagctgcccgcgctgccgcagaggaagcgcttatcgaacaacgcatcattatggccgatccagaggcttatcaggagtttctcgttcgtttggatcaaacaccttcacctaatgccgcactgcgtaaaaccatgcagacccctgcgccgtgggagcaggaaaaatgatctccacccctgagccgcttcatgccggacatattcttactccgttttgctgcggtgtggattctatagataactggctggaacagcgggcgatgaaaaatcagaccactggcgcgtcccgtacctttgtgtgttgtggcagcgattcgaacgtactggcctattactcgctggcgtccagcgcggtcacgacgaatacctcccccggtcgctttcgtcgcaatatgcctgacccgattccggttgtggtattggggcgtctggcggtggataaatcgcttcatgggcagggcgtcgctcgggcgctggtacgcgacgcagggctgcgggttattcaggtggcggagactatcggcattcgtgggatgctggttcacgccctgtcggatgaagcgcgggaattttatcagcgggtggggtttgtaccgtcgccgatggatccgatgatgttgatggtgacgttgggggatttggtggagagtgtttaaactccagaacgcatcccttagcttctgatggccggaattcgctgtggatagtcagtgagccagaccggttttaccgcttcagccggacaacgacgtcatgacggtctggacggactgcaaacgggggaagggggcgttgaattcatgcgaatcggggaaaccaaaggcattctccacgcccggccgcccctacgcagttgcacttcctttcatttgctgtggccagtttgcgggaagactttcaccttcagtaattaagtttggggtgatcttctttactcaataaattatttttgtcgttcagctcctcacggacttttgccagtgacttctgaaaagccgggattgtttgcagtcttgcaaactctactgctcccacataacggccagcatcaacatcgctttgccagtgagcaccgcatatcactctgctttgcccgaactcccatccgcgtctggcgagctcctgcgcgcgttccggtctggcctcggataatactaatgccagaagtgtaccataagcagtatgcccggaagggtaagagccattttttcgcaaagtattctcatcttcaggacggcaggtggaatgattaaataagacaaaggggcgggtacgcatataatatttttttgccgaagcagtagcgtagtagccgcccattgtcagaagattctttaacatattccaggtttctggcgtatctttggggttaattttagcacccactactggcgagaatattctggctatattttccacgcttacatctgcatcctcagcagcttgtttccatcgcggggaaccctttatcgcatagcccttaaaataagcctccttatcatagcggtaagccggatcatcattacctggcggtggtggtaagtagaactgactgttcactgattcttcaggagaatgaaagggttgcactgtttctgctgatgtatatttagctacgatcagtggtagaaaaaatactaaataacgacttttcataaagactcactccggatcaggcaataataaacagatgtaatcctataatgatttattgcaatggttattcaacatacaggtaaaaaagcaggacgctgccctggcattatcgtctgtccataccggactgactgcagcggacaacagaacaataccggtacttccggctaacagcattttgtttaacttttgtccccgattattttttatctacgtgcctgactgacacgcattaggttaaaatctttccgtaataacacagtatgaataattattttaaagtatgtgctctgttaccccgataactaccatcagtcatgatgtgctgagtattaatttatgattatgaacaagagtcggaaacagtatttaagaataaagaaaccgaaaaagaaaaaatgctaaaattggcgaagggattattgttatcagtgatgaaaaagttcatggcggagatattggattcacttgtcggggttagcgaaccgtcagatggagtgatacgcgttattactggtaataatctccctgtagctaagtaagctttcctgacaggcgtgataaaagttccgcgcgataaaaaggcttgtacctggcattataagactcgcgtcctgcagaaacagggcagggaagggctcggcggttttaatcaggtatatctgttaaatcacatccttcaactggagcagcctttgttttaaccttcctctcatcgggccggaatgcttcgcctgcgttgatgtagcagaaaccggagaaatcacgccatccgatttcttgcaaatatcaggcgcaaaaaaacagacttgcgctaacaagtctgttctttaagagcctttcttttaacaacaagtaacagcgttacatcgtgtttttaccggcttgcctttgtgtccgtcagcattgcatcttgcaaatctgatcaaccggctttgaatagtggtgcggactcggagtcatattcacgattaacgtgctgtttgttattggttttgttggtatttcttacaaacagcgctcccacgaaggccccataaaaaatcgctttatttttgtgatggttatcacgaaaaatcgtcgtttaagggtagggcttcgttatgtgtcctggtccatatataacgccagaatgagttggtttaaattttcaccaaaaagtcgcttctgaatcgacaaatagagtaatttttcaacccgtcgacttttcacccagaaatcacacaccgctcctcaccgtaccatagctgtgaacgctccaaatccacgaattccccctcatcgtcaataagctcctgaagggcgcttaatccttcttctgtttttcgggctgcaatatgcgattccagactgtcccaccacaactcggcgcaaccatcaaaatcgacgggcaatgaatttcttgtctgctgaagcgctgattgcgcggcactgttcgccaggggaactgtctggatgtacttacgaataccaagacgttctgagtgtttaaccaccagtgaggcatgttggttacgccagtaatgatcaaattcttctcgcgttaaatgggcacgccttttgacgcacatgactagttttaacatgttgctactcctgtcatttcgggagttcaaagcttacactctgacagcggtgtcagagtcaagaggacgttatgcagattggaaaactggcggcattgactggcgttagcatacggatgcttcggtactacgagagcgcaggtttgcttcatccttcgcgaaccgatacgggctatcgcagtttctcgtcagaagatgtggatattgtcagacggatacttattctaaatggtgcaggtttcacgttaccggttgtgtgtagtttgctgaactgcgtacatgcaggaacctcaccttgcgaggaactaaaagctaaagtgcgagaacaactggcacagatagaccgtcagtttgacgcgctctcggaaagccgcaatcttctcaataagtttcttaatgactagcccctgacaatttaccttctaacaccatgtgggaaatggattctactcctccgattgaacattgttcaaattcacatttgatattgaccctggcccaaagatgagcggctgatcgacgaagcgctgggcgttgcgccagagaaaatctggccttctcgttatagctagtcaggccagagatgggggctacggatttccattcccagaaaagcaaaaacccagccataggctgggttttctgaataagtggtgcccggactcggaatcgaaccaaggacacggggattttcaatcccctgctctaccgactgagctatccgggcaacggggcgcattaaaccgtaaaggggcgcggtcgtcaacggctttacacgaaaaaagtgataaaagcgcgctgactgcctgcttttcaggcaaaatgcataaaatcagtacccgtcaggtgagcgctccaccctgacggcactgtgcaaaacgcagaatatcttccgccaaccgctgagcggtatctacatcagcctgactgcggttgaccagcattcggctgagacaaccttccagcaccagctccatctgccttgcaaccatcgccggatcgtcaatttccagcgtggtcagtagctcatgggtaaaatcatgtgccgcgcgtttttgttgattagccagttggtgaataggatgggttgggtcgggataaaacgtacaggcggcaatgaacaagcaaccaggataacggttattactgacacattccgaaagcgcgctgtagcgtgccagtagcttttgttcagcagaaagcgtctcatcaagaagaagctggcgtcgccagatatctacctgctgactcagataacgtagcgcgtcatataaaatggcttctttatctggccagaaacgctgtaatgtgtcgagtgggcgatttacgcgctccgccaccatttccagcgtagtatcggctatcccttgcgtctccagtaatttcagggcttctcccagaatatcttcacgttgcacggtattctcctccgtctttgcttttgcaagtgtcgctcacggttggcgatcgtgcaaatgcgcgctaaaggtggcggcgtccataaagccggtgactcgcgattgcggctgttcctggccttgggtattaaagaacagaatggtgggcagcccgaggacttgcagatgctttaacagcgcgacatcctgcgcattgttagcggtgacgttagcctgcaagagcaccgtgtcgccgagcgcctgctggacccgcggatcgctgaaggtatacttttcaaactctttacaggccacgcaccagtcggcgtagaaatccagcataacgggtttgcctttggcctgcgccagcgcctgattgagttcatccacggtagaaatagccgtgaaattgaggtgcgctggagcttgcgcggatggcgatccgaacgcccaatcctgtagaggccgcacgctaatgagcgctgccgccagcaggataatctgtacgatacgcatccacgctcgtctggcctgaaggctggtgataaaggcccaaccaaagaaagcgacgcccagcagcgaccacagacgtaaaccccaagcctcgccaataatccgctccagtaaaaagaccggtaacgcgaggatcacgaaaccaaaagcggttttaacatgcgccatccacgggccgcttttcggtaacagacggttgccaaacacggtgaccagcattagcggcagacccatacctaatgcatacaaatacagcgtgccgccgcccagccacatgttgccgctctgagcgatataaagcagaatcgcgcttaacggcgctgtagtgcagggcgagcaaattaatccggcaatcgcccccataacaaaaacaccgccgggcgagccgccttgctgacgattactcattaatgtcagccgggtttgcagtgaggaggggagctgtagtgtgaacaggccaaacatcgacaacgcaagcagggtgaacacgatggcaaggccgattaacacataagggtgctgcagcgccgcctgaaactgtaatcccgccgcggcgacgaccagacccagtgcggtataggtcagcgccatcccttgtacatagataaaggccagcagcagtgcgcgccccgtcgacaaacgttgccttccccccaggacaataccggaaatcagcggatacatgggtaaaacgcagggcgtaaaggcgatgcctatgccgatcagcagcgcccagagcgcggaaaaaggtagctgggcggcgggttttgacgtctcactcgtctgggtgacagcaggcgtcggcgtggcgtctattgccgcggcgacttcacttagcggcaccgttttcgtttccggcggataacagaatcccgcatcggcgcacccctggtacgttaccgttaatgtcgcgccagccgccgcctggttaaccgttactggaacgtttagccgcttacggtagatttcgctttttccgtagaactcatcttcatgccagacgcctgtcgggagttggactgcggcgatatccgctttcgtcggcgtgatactgatttgtttacggtaaaggtagtaaccctcttttacctgccaggagagggtaagatcgtgttgattttgctgaaaatcaaaaacaaacgcccggtcggcagggacgaactgcgagcgacccggcgcgtcgaataatccggcgaaggcggatgtgctgcacagcagcaggatcagcgtaaagatgcgttgagccatgagaggtaatcagtatctccgtgagtaacaggtaaaaccagaagttcaggcgtttgatacgggtgatgagacttcaggcagtcgataagcgcttgctgatgtgaaacggtggtttttaagatcatttgaacttcatactcctgctccagtttgccttcccagtagtacagcgatgtcgcgccggggaggagggtggcgcaggcagccagtttttccgccagcactttggcggccagatcctgggcggtagcttcatccggggcggtacaaagcaccacaacggcctcggggatggaaatatcctgactcttaacatcaagcataaacacctcgaaagaacaaaaagacccgcaagtgaacggtcactatacaacggacgagggcaggatgttagtcaaagggcgggagaatgcggggcgtgatacgccccgcgggtgaaacacttacagcataaagctgcccagcaggaagccgaagcagacagccagaacgacgcccagggtgcctgggatgaagaacgggtggttaaagacgaatttaccgatacgggttgtaccggtgtcatccatctgtaccgctgcaaccagagtcgggtaggtcggcaaaatgaacaggccggaaacggcggcgaaggaagcgactgccgtcagcggagagacgttcagcgccagcgccatcggcatcagcgctttcgccgttgccgcctgagagtagagcagcgcggaagcaaagaagaagatgacggccagcagccacggatgaccctggatgacgctacccgcagtgtctttgatccagtcgatgttagcggatacgaaagtatcgcccagccacgccacgcccagaatacagatacaggcgctcatccctgctttaaaggtactggagttgaggatggcgtcagtttccactttacacaggatggtggtcagcgttgcgacgctcaacatgatgatcaaaatagcgttggtggtgttcatcagcggtttctcaaccaggccgaggctcggactgttaacaatcgcataaacaaccacgcagataacgcccagcaggaacagccagacggaattttttgccattggtttgatttcaatctgcttttcaccacgcagttcaatcagcccttcttccagacgcttgcggtaaatcgggtcgtccgacagtttggagttgaacagcatcgtgaccaggaaggacatcaccagcaccgccagcagcgtagaggggataaccacggacagcaggtgaatatagctaatgccatgaccttccataacagaagacatatacaccacggccgcagaaatcggcgaggcggtaatcgcaatctgcgcggataccacggcggtcgagagcggacggcaaggtttgattccctgctccttcgcgacttcagcaataaccggcagcgttgccagggaaatattcccggtaccagcaaaaatagtcaggaaataggtcacaatcggtgcgaggatagtgatgtatttcgggttcttacgcagcagtttttccgtctggtttaccaaataatccagaccgcccgcgacctgcatagcagagatcgcggcgataaccgccatgatgatggaaatgacatcgaatggaattgtccctggcttcacgccgatggcggcaagtaccagaacacccagcccacctgcgaatccaataccgatgcccccaagtctggcgcccaaaaagattgccagcaaaacaatgataagttcgacaactatcatattagccttccttgttgtttaacaagttgatattaaattgttgttatttggtaacttcttgtaagaaaaaaggcacgtcatcgtgacgtgcctctttggtactaccctgtacgattactgttcgctttcatcagtataacgtttagctttataagccgggtgcatcaagttctgtacggagaaaatatcgtccagctcggcttccgttaacaggccgcgctccagcacaacttcacgtacgctcttaccggtttcagcacagattttaccgacgatgtcgccgttgtggtggccgatgaacgggttgaggtaagtgacgataccgatggagttataaacgtacccttcgcacacttctttattcgcggtaatgccgttaacgcatttttctagcaggttgtagcacgcgttgctcagaatgtggatggattcgaacatcgcctgaccgataaccggctccataacgttcaactgcaactgaccggcttccgccgccatcgtaacggtggtgtcgttaccgatgactttaaagcatacctggtttacgacttccggtacaaccgggttcactttggctggcatgatggaagagcccgcctgcagttccggcaggttgatctcgttcaggccggcacgaggaccagaagagagcaagcgcaggtcgttacagattttggacatcttcactgccaaacgtttcagcgcgctgtgaaccataacatatgcgccacagtcagatgtcgcctcaatcagatcttcagccggaacacaggcgaaaccagtgacttcagccagttttttcaccgccagcggagagtattctttcggcgtgttcagaccagtaccgattgccgttgcgccaaggttgacttccagcagcagctcagcagtacgctcgatgcttttcacttcttctttcagcaggatgctgaacgcacggaattcttgaccaagcgtcatcggtacggcgtcctgcaactgggtacgacccattttcaggatgtcctggaattcaaccgctttacgttcgaaaccttcacgcaactggttgatggcatcgatcagtttgacgatagaggcgtaaaccgctacacggaagcctgtcggataggcgtcgttagtggattgacatttattcacgtggtcgttcgggttcaggtactgatattcacctttctgatgacccatcagttccagcccgatgttggccagcacttcgttggtattcatgttgacggaagtgcccgcgccgccctgatagacatctaccgggaactggtccatgcacttaccgttgttaaggacttcatcacatgcggcaatgatggcgttcgccacactcttaggaatggtttgcagctctttgttggccagcgccgccgctttttttaccataaccatgccacgcacaaattcagggatgtcgctgattttgttattgctaatgtagaagttttcaatcgctctcagagtgtgaacaccatagtaggcttcagctggaacttccctggtacccaacagatcttcttcgatacgaatgttgtttgacatgtgaaccttctttttcaagctgccaatgatttttactttaaaacacacaggatatatgtgatttcgaatgttttctgaccgacgattatcccctccatcggcctgataaacgagatcatatgctggttcagaattcctaccgtaatctggatcacttaaagtgtgggaatttaccccttatttattattttgtgaaataggtcaccgctttagtattactacctaaaataggtgtacaaaccacttgaaattttgctacgcaccaccatatcgaatcgatgcgaatcgcaaccccattcaaatggtcgtcgcagacggccatgacttacaggagagtcctttgcgctggataccctttttagctgtctttctctatgtttacattgagatttctatctttatccaggtcgcccatgtgcttggtgtcctgatgacgctaatcctggtgatttttacgtctgttatcggtatgtcgctggtacgtaaccagggttttaaaaactttttgctgatgcaacaaaaaatggcggccggtgagagcccggcggcagaaatgattaagagtgtatcgctgatcatcgctggcttactgctcctgttgccggggtttttcaccgattttctcggccttctccttttgttaccgccggtgcaaaaacatttgacgctgaagttgctgccgcatttacgtttttcccggatgccgggcggcgggtttagcgcgggtactggcggtggcgaaacatttgacggcgagtatcagcgtaaagatgacgatcgcgatcgtattgaacataaagacgatcgtcgggattaaaggtagagatgctggccggataagtcgcgtgaggcgttatccggccaacagatacgtcttacgccatgcgttttcgcttcggtaaaaacagccataatgctgccagcatgataatggcatataagcttttccaccccagcattaccagcaataacaggcacagtagacaacccgtcaccgccagtgcatagcagcgccctttcaatagtcgacagcccgccagcatacaaagcagatagagcataataaaaataccgttagcatagacgatcagcgcattgaggttaatcttcagggcgtagacgaccagggaactcacgcaacaacaggccagaataacgtttaacgcgtgcaagggaaggcgcccgggagagagttgagccagatagtgatcgggctgatattgcatttgcgtccatatcagacgcgcaaaactctgagcatacacattcaggctggcaaagcaggtgagataaccaataatgcaggctatccacaacgcctggataccgaagagatgaacaataataagcggtagcgatgctgttgccgctatcttgtcgctatagacgccaaaatgcagcaccacggcggtacaggtccaataaatggagccggccagcatcaggccaatgatcaatgcgcgcggaaaatcacgttcaggatttttaaattcagacgacaaatgcgtaaaagcctcaattcccacaaatccccagaacatgatcgccagggcggtacacagccgggaaaaggtgatttcgtttgcggctgggaaggtgatatctgcaggtttaatcgcgcctttccacagaatggcggcaataagcgcgataattaatccagcgataatggcttgcaggttggcgctggagctggcgccgcgcgatcccataaaccatagtaaacctagagtacccagctccccaaataagagctgttcgctttgccagccaaacagcgcctggccgaaacccaccgcaatatgcaaggctgcgggaaaactaacaggaatgactgataaaaacagccaactgatcacccgttgcagacgcgggccaaatgccatcccgacaaaatgcgctacgccgccagcgtgtggaaagtgacgccccagcacagcaaagacaatcgcaatagggaaaatcaaaataatgagcagcggccatgcccaaaggctgatgtcgcctgccgccagcgcagccagctccggaagcgcaaaaacgccagtccctaataatgatgtggttaacaagataacgccctgaaccaacccaagctctttttttagttcattcatcagctcattatccggcggcattgtaacgtcaggtgacgacagacatttttaagcgtatcacacacgccttttcttatagcaggatgttctaaaccttgggtaaacgtgagataagtagcgtttttaccgcttttttcgctcagaagaattttttttcatctccccccttgaaggggcaaaaccccatccccatctctctggtcaccagccgggaaaccgtttacgggccggcgtcacccataactgataatgactttctcaaaggagagctatcaatgagtattcgtccgttacatgatcgtgtgatcgtcaaacgtaaagaagttgagtctaaatctgctggcggcatcgtactgaccggttccgcagcgggtaaatcaactcgtggcgaaatcatcgctgtcggtaagggtcgcatcctggacaacggtactgtacagccgctggacgtgaaagttggcgacatcgttatttttaacgatggctacggtgtgaaatctgaaaagatcgacaatgaagaagtgttgatcatgtctgaaagcgacattctggcaattgttgaagcgtaatccgcgaacgacactgaacatacgaatttaagggaaagagaaaatggcagctaaagacgtaaaattcggtaacgacgctcgtgtgaaaatgctgcgcggcgtaaacgtactggcagatgcagtgaaagttaccctcggtccgaaaggccgtaacgtggttctggataaatctttcggtgcgccgactatcactaaagatggtgtttccgtagcgcgtgaaatcgaactggaagacaagtttgaaaacatgggcgcgcaaatggtgaaagaagttgcctctaaagcgaacgatgctgcaggcgacggcaccaccaccgcgaccgtactggcgcagtccatcattaccgaaggcttgaaagccgttgctgcgggcatgaacccgatggacctgaaacgtggtatcgacaaagcggttgctgcggcggttgaagagctgaaagccctgtccgtaccgtgctccgactctaaagcgattgctcaggtaggtactatctccgctaactccgacgaaaccgtaggtaaactgatcgcggaagcgatggataaagtcggtaaagaaggcgtcatcaccgttgaagacggtaccggtctgcaggacgaactggacgtggttgaaggtatgcagtttgaccgcggctacctgtctccttacttcatcaacaagccggaaactggcgcagtagagctggaaagcccgttcatcctgctggctgataagaaaatctccaacatccgcgaaatgctgccggttctggaagccgttgcaaaagcaggcaaaccgctgctgatcatcgctgaagatgttgaaggcgaagcgctggctaccctggttgttaacaccatgcgtggcatcgtgaaagtggctgctgttaaggcacctggcttcggcgatcgtcgtaaggcgatgctgcaggatatcgctaccctgaccggcggtaccgtaatctctgaagagatcggtatggagctggaaaaagcaaccctggaagacctgggtcaggcgaaacgtgttgtgatcaacaaagacaccaccaccatcatcgatggcgtgggtgaagaagctgccatccagggccgtgttgctcagatccgtcagcagattgaagaagcgacctccgactacgatcgtgaaaaactgcaggagcgcgtagcgaaactggcaggcggcgttgcggttatcaaagttggcgctgcgaccgaagttgaaatgaaagagaagaaagcccgcgttgaagatgccctgcacgcgacccgtgctgcggtagaagaaggcgtggttgctggtggtggcgttgcgctgatccgcgttgcttctaaaattgctgacctgaaaggccagaacgaagaccagaacgtgggtatcaaagttgcgctgcgcgcaatggaagctccgctgcgtcagatcgtgctgaactgcggcgaagagccgtctgttgtcgctaacaccgttaaaggcggcgacggtaactacggttacaacgcagcaactgaagaatacggcaacatgatcgatatgggtatcctggacccaaccaaagttacccgttctgcgctgcagtacgctgcttctgtggctggtctgatgatcactaccgagtgcatggtgaccgacctgccgaaaagcgatgctcctgatttaggcgctgctggcggcatgggtggtatgggtggtatgggcggcatgatgtaattgcccaccccctgcatccttcaggctgcagatgcgttggctaaccccagtcacttacttgagtaagtgactggggattaacaaactggccgccttcctgcaaccagaatgatttgggtgcttatctcccagaattgagaaacccccgggcagaaatgaccgggggtttttcttttagtcatctttttagtataagattcagatacggacaaaacgtccagctcattgattatggggaataacatgcacgtgaaatatttagcagggatcgttggcgccgcgctgctgatggcgggttgtagctccagcaacgaactcaccgctgccggccaaaatgtacgctttgtcgaagataagccgggcgcggaatgccagcttattggtacggcaactggtaaacagagtaactggttttcaggccagcacggcgaagagggtggctcaatgcgtggcgcagcgaacgatctgcgtaatcaggcagccgcgatgggtggaaacgtgctgtatggcgtaagtagtccgtcacagggcatgttgtccagttttgtcccgacggccagcgagatgaacggccaggtttataaatgtccgaactgatatgtctgaatcgtaacgccctctgaaagattcagagggcgatatggttagcgtttttcctgcgatgatgccatgcgtagattatgcaacgcgcgcatgcattgatcttgcgtcagacgcgctgctttaccggttccaagcgttctgacaaaaaccttacacggttttccttccagctttttaagacgcgggctgaaattcagcaagcggcgtgatattgcttcagcttctttagagcctgactgactacgggtcttaatgatggtgccgcaatcatgcgattgtcctgcctcatccgtataacgataaacgagcgctaaataatggttatacagattatgtttccagtcaggctggttataggtatcgaattcgatattaccgttttccaggcagtcagcatcgtataatggtaaaaagtccagcattgaagaaatacgcaatgcgagctcacgcatttcggcattattaatggcgtgaataatagccatcaccagaacttcaacctgccactcaccgacctgtaaatcaagatggctaccattgtgcagctttaacgtaaaggttaatactttttctgtattatcgctcaacgctaaagattcaacacgctgattaacatcggcgttttccagctcttcacggagtattgccggaatattctcatgcattttaagcacatgactgcttttagctttctggcgtttttcctgctcttgttccggaagcgagtgttgtagataaagccggtgttcaaggccgatcaacaagtctcgcagcgcgagcacaggaaagaaaagcagtgtttctttatttctcagtgacttcaccttaagcgccagcgcgataaacttatcattgtgacgaataacgccggtatttagtcccttaatcgttaaggccatgtcaattctccacaaatataaaataattaaatgttttactgcaatgtatttgatatataaattgtttatgccgtcctataaaaaggagaaccagtataattcgaaaatgcagtacacgctaagcgagtcctaaaacggactttattgaaaagagaggaccggaaaggtgtatttaacgaaggttagtttatcctcgccaaagggtgaggagaatcgcgggggagtctcctcgtaatattgcgcggtaatatttttcgtcgtccctgacgcgcccgcgaggattagcactgccgaagctgtaaatccagcggtgttttgctcggttcgccgccgatttcacgcgccagtcttggcaccatatagccggataccagcgtgagcagttcgcgcatgatttgccgggcttcgtcatcggtgaccataaaatgcgcggcgccctgcactttatccagcacatgcaggtaatagggcatcacgccggcgtcaaatagcgcgttgctcagattcgccagcgttcgcgcgttatcattcacgccacgcagcaggacgctctggttgagaagcgtgacgcccacgtggcgcagtttcttcatcgccaggccgaacgcctcgtccacttcattagcgtggttgatatggttcaccaacaaaatttgcagacgtgactggtcaaagcgggcgaccagttcgtcagtaatgcgtgccgggatgacgataggcaaccgactgtggatgcgtagccgcttgacgtgcttaatggcttccagttgcgtgagcagccagtccagctcatgatctttcgccatcagcggatcgccgccggaaaagatgatctcatccagttccgggtgtgcggcgatatactccagcgcgactgtccagttgcgcttattgccttgattctctgcatacgggaagtgacgacggaaacagtagcggcaatttaccgcacatccgccttttaccagcaatagcgcccggttttggtatttatgcaataatcctggcaccacgctgtgttgctcttccagcgggtcggtggagaaaccgggggcgacaataaattcatcccgggacgtcagcacttgacgtaaaagaggatcgtcagggttgcccttctccatgcgcgcaataaaagcgcgcggcacgcggagggcaaacaagcgcctggcgtcctgtcctgcccggaggttttcatcagcttcaatctgtaaaagatgcagcagttcgtcgggattggtcacaacatcggcaagttgcgctaaccaatcttctcgcaatggggtatttagggttacaatatgcgccattttgtggcttagctaccagttaacaatttcagagggccttatggcgacttactatagcaacgattttcgttccggtcttaaaatcatgttggatggcgaaccttatgcggttgaatccagtgaattcgtgaaaccgggtaaaggccaggcgtttgcccgcgttaagctgcgccgtctgctgaccggcacgcgcgttgagaaaaccttcaaatcgaccgattccgcagaaggcgcggatgtagtcgatatgaacctgacttacctgtacaacgacggtgagttctggcatttcatgaacaacgaaaccttcgagcagctgtctgcagatgccaaggctatcggcgacaacgcaaaatggctgttggatcaggcggaatgcatcgtgaccctgtggaacggtcagcctatctctgtcactccgccgaactttgttgaactggaaattgttgataccgacccaggtctgaagggcgataccgcaggtactggcggcaaaccagccacgctgtctactggcgcagtggttaaagttccgctgttcgtgcagattggcgaagtgatcaaagtcgatacccgttccggcgaatacgtatcccgcgtaaaataatttacgttatcgggaaaaatggtgcagcgtatgctgcgccatcctatttttcgcgcctcaatgatgaaacgctttatcggtcttgtcgcgctggttcttcttaccagcacattattaacggcatgtaataccgcccgcggcttcggcgaagatattcagcatctcggccacgccatctcccgtgcagccagctaatcgcttctcgtcttcctaaaattagtcgatcgcccatcattttctgggatgttgtctattattaagttgctatacacaaacaacattggctagaaaaggaagacattatggttaaaaagacaattgcagcgatcttttctgttttggtactttccactgtattaactgcttgtaataccacgcgcggcgtgggcgaggacatctcggacggtggtagtgcgatctctggcgctgcaaccagagctcagcagtaatcatcaacggtacggcatggcgtcgtaccgttaatcgattttctccggaagcataagaaagggagaataccggttatccatatgaagtttcatacggatattacgtttataggtgtaaaccgttttcccgtgaatgccaagcgcatacgcaatctctttattgctggtgccttccgtccacatcgcgagcactttttcctcctgcggagagagcaatggcgtggcgctttccggcgcttcctgcagtggatgagtatgtagcgctcctttaattcgttgtgcaagctcatgtaaaggcgtgtgtttagataacaccgcatgactggcatattgcggtctgtacggcatattccctgactgtaataataccaacggcgtcatcctgcaggcggcaaaaaatgcattgataggctgttcgggtaaggcatcgttgagaaaaccatataaatcagcgataaccaggtggggcttccattgcagaatatgttctttcgccagtataaggttattcatcccggataccagcagtgaagaactgagcacatcagtgtgattaagccaggcctccatgcccgtacgggtaaagtggcatcggtctatcactaaaattttcaacatagttttttgcacccggaagtagataaagcactttctttcccagaaggcgttccatcatagagaactcctgtgggcgctaaatgcgaaaactacgcggcttaaaagggccaattcccgcctttagacggaaaaaaataaaaaggttgaaattcattttctctcaggcaagaatggcttttcatccgtatacgttacaggacgacctgtaaacgctattctcaccggggacggccccattaattatctggagcctgctatgtcctggatcattctattaatcgctggtttacttgaagtggtatgggctgtcggcctgaagtatacccacggtttttctcgtctgacccccagtattatcaccattacggccatggttatcagtatggcgttactttcctgggcaatgaaaacgctgcctgttggaacggcgtacgccatctggaccggcatcggcgccgttggggcggcaatcaccggtatccttctgctgggcgagtctgcctcaccggcgcgtttgctcagtcttggcttgatcgtcgcgggtatcattgggctaaaactcagtgcgcattaattcgtcgctgatattgctacgaacctgattgttttacccaaattaatttattgacgtcaaacccctcccgggtcgcgacggccagcatttgctgttttatttcctcagaaagcgttggcgtgcgagagagtatccacagatagtcgcgatccgggccgcacaccagcgcatgacggtattcccggtcaagcgcaatcacgttatagccgccgtagaacgggccgaaaaaagagaccttgagcgcggcgcggtttggactaccggtaaaatacgctttgccttctgttttttgccacatttcccgatccgggttatagcctttattgatgacattaatcccgccatcgtcacgcagactataggtggccgtgacttgttccagtccacgttcaaatcgatgatcgaggcgtgcgatctcataccaggtgccgaggtaacgtttggcatcaaagttatttaccacggtaacgcctttaggcggggtaggcgaactacaggcgacaaccaaaaatgccgcagtaaccgcagcaacgacgggcagcaagcgcatagcgtttttccttccagtgttttttctaagtgtagaacctggcgggaaaatgagaggcaggaaaagaaaaaatgccctcttatcgggtagataagagggcgtcgtggcaacttagagagtgataacgccaatcgccgtcacaacggtcaggattgccgccagaccgtagaagacccatttgcccgcgggcacgtggattttcaggtcatgcatcgcgtggtgcatacggtgtaggccacaccatagcggcagcacgatcatcaggaacagaaaaacgcgaccaatgaagctttgggcgaacgtcagtacgcgctcaaaactcagggcatcgcccggaaatagccccagcggcagcatgatgccaaccagtagcacgatcaccggcgcgatgatcgcgccccacataccgcctgcgccaaacagtccccagaatacgggttcatcagaacgttttgggtttggattaatcatccgggactccttaccagaacagggcaacatacagaatgactacggtgactaccgcagtgaccacccaaagccctttgatgattggctctggccccattttttcgtcttttacaatgatattggccgccttcggcgccagttcaaaccaggttttggtgtgcagcagcgcggccgccagggtgatcaggtttaagatcaccaccaccgggttttgtaaaaagccgacgaatcccatccaggattccgcgccgtgtttgagcgcaaacagaccgaaaatcagttcaatactgaaccagactgccggcaccgctgtgccttcgcgcagcatataaaagcgataaaacggcagttttttccaccaggtggacgtcatcggccgcacatagggtttgcgtttagtcgtcatgttgcactccttagcgtggtttcagggtggcgataagaaagtctttcgagctttccactttaccctgctgaatggccgcagccggatcgacatgttttggacagacttcggagcagtagcccacgaaagtacaggtccatacgccgttcggactgttcaactgcgccatacgctccttcttaccgtgatcgcggctatcttcgttatagcgatgcgccagcgtaatcgcagccggtccgataaattcaggattcagaccgaactgcgggcacgcggcgtagcacagaccacagttgatgcaaccggagaactggtgatacttcgccatttgcgccggggtctggacattcggcccctgatctggcgtgcgagagttgccaataatgtacggtttgatcgcttccaggctttcgataaagtgcgtcatatcgacaaccagatcgcgttcaatcgggaagttcgccagcgcttccaccttcataccgttggtgtaatcgcgcaggaaggttttacacgccagtttagggacgttgttgaccatcatgccgcaggagccgcagatcgccatacggcaggaccagcggtagctcaggtctggcgacaggttatctttgatgtagcccaacgcgtccagtagcgatgttgtttcatcataaggaacttcatagaaagcactgtgcggcgcggtatcggtttccgggttatagcgcaccacctcaactttcaggtttttcatctcagccattcgccttctccttcttatcggctgcttccgcttcaccgccgtaaacacgtttggctggcggcagggtggtgattttcacgtcgctgtattccagacgggtcgtgccatcagcatcgcggaaggcgagggtgtgcttgaggaagttcacatcgtcgcgctcggtacagccttcatccagacgctgatgcgcgccgcgggactctttacgcgccagcgcagagtgcgccatacattccgccacgttcagaccatgacccagttcgatggtatacagcaggtcagtgttgaacacgctggaggtatcggagatacgtacgcgcttgaaacgttcctgaagctcggccagtttatcaacggttttctgcatcagttccggggtacggtaaataccgcaaccttcttccatagacagacccatctcatcgcggatcttcgaccagttttcgttgccttcctggttcaccagatttttcagacgctgttcaatatcggcaacctgggcgtcgagcgcggcgctatttgcggcgcctgccgtagcagcgcgttccattgcttgttcgccagccagacgaccaaacaccaccagttccgccagtgagttggaaccgaggcggttcgcgccatgcaggccaacagaggagcattcgccaacggcaaacagccctttgacacggctttcacagttctggtcggtttcaatgccgcccatggtgtagtgcgcggtcggacgtactggaatcggttctttaaccggatcgacgccgacataggctttcgccagttcgcaaatgaacggcagacgttcatgcagtttcttctcgccgagatgacgcaggtcgaggtgaaccacatcgccgcgcggcgtggagatggtgttgcctttacgccattcgtgccagaaagcctgggatactttgtcacgtggccccagttccatatatttgtttttcggctcgcccagcggcgtttcggggcccatgccgtagtcttgcaggtaacgatagccatttttattgaccagaataccgccttcgccgcggcaaccttcagtcatcaggataccggaacctggcaggccggtcgggtgatactgaacgaattccatatcacgcagcggaacgccatggctcagcgccatgcccatcccgtcgccggtgacgatgccgccgttggtgttatagcggtatacgcggcctgcgccgcctgtcgccatgaccacggcgttggcacggatttgcaccagcgtgccttccatcatgttcattgccaccaggccgcgcgcatggttgtcatcaaccagaatatccagcacgaaatgttcgtcaaagcgctggatttgtgggaactgcagggaagtctggaacagggtatgcagcatatggaagccggttttatccgcggcgaaccaggtacgctcgattttcataccaccgaagcgacgcacgttaacgctaccgtccggacggcggctccacgggcagccccattgctccagctgcgtcatctcagtgggacaatggtggacaaagtaatccacgacatcctgctcacacagccagtctccgcctgctaccgtatcgtgaaaatggtagtcaaagctgtcatgatcctgggcgacagcggctgaacccccttcggcagcgacggtgtggctgcgcatcgggtacacttttgagatcagtgcgattttagcattgggattcgcctgtgcggcagcaattgcagcacgtaatcccgcgccaccggcgcctataatggcaagatcggcttgaaaggtttgcacgacattcctccagattattgtaatttcaccctcgcgcagccagataaagcctctgggttctgcgaagtatgaatgcgtttccactgctcctttatgggtacaacagtatagtctcagggatgtgagggaaatttgacgtgttcgatttttttagcgtatcagagggatgaattatcattgattttgattaatttaattactaaaccatctgaaatcactttttttaccctccagaaggcgcccgatacgcctgcgcaaaatttgtttcgcccgcgcgttgcgagtagacttcgtgaccttgtcttaaactggagaaagaatcatgagcgaaacggcaacctggcagccgagcgcgtccatccccaatttattaaaacgtgcggcgattatggcggaaatccgtcgtttctttgccgatcgtggagtgcttgaggttgagacgccctgcatgagtcaggcgacggtcacagacattcatctgttcccgttcgaaacgcgtttcgtcggacctggccattcccaggggatcaacctctatttaatgaccagtccggaataccatatgaaacgcctgctggcggcagggtgcggcccggttttccagctatgccgcagtttccgtaatgaagagatgggacgacatcataatccggaattcactatgctggagtggtatcgcccgcattacgatatgtaccgcctgatgaatgaagtggatgatttgcttcagcaagtgctggattgtcaacctgcggaaagtctctcctatcaacaggcgtttcagcgccatctggagattgacccgttatcagcagataaaacgcaactgcgtgaggcggcggcaaagcttgatttaagcaatatcgccgatacggaagaagaccgtgatacgttgctgcaactgttgttcacgatgggggttgagccgcatataggtaaagaaaagccgacctttatttatcactttccggcaagtcaggcatcgctggcacaaatcagtaccgaggatcatcgcgtcgccgagcgctttgaggtgtactacaaaggtattgagctggcgaatggtttccacgaactgacggacgcacgtgagcaacaacagcgctttgaacaggacaatcgtaagcgcgccgctcgcggtctgccgcagcagccgattgaccaaaatctactggatgcgctggccgccggtctaccggattgttccggcgtggcgctgggtgttgatcgtctggtgatgctggcgctgggagcagaaagcctggcggacgtgattgcttttacggtcgatcgggcgtaaatctgaaattcactctttcgcgagataaaatggcgcaataagcgccattttgtagcatattttttcaattatcctctgtttgccacaacataaggctggaactttgatgccatttaggtatcaatcctgtgttgatttttttatcgctgaccttcgtaaaaaagaaggcggcgtcaatcggtgagcggcgtctggcaaacgcgctcgagcgtaagggatggttgaatgacccacacgataaaaaagatgagccttattgggcttatcctgatgatttttacttctgtttttggttttgcgaatagcccgtcggcgttttatttaatggggtatagcgcaatcccatggtatatattttctgccttgctgttttttattccattcgccttaatgatggctgaaatgggttccgcttatcgcaaagaagagggcgggatctattcgtggatgaataatagcgtggggccacgttacgcgtttattggcacgtttatgtggttttcatcgtatgtcatatggatggtaagtacggcggcaaaaatttgggtaccgttttctacttttgtttttggcgccgatatgacgcagcactggcgtattgcagggcttgagcctacgcaggttgtcgggctgctcgccgtcggctggatgattctggtgacgtgtgtcgccgccagagggatcaataaaattgcgcgaattacggcggtcggaggtattgccgtaatgtgtcttaatttagttttattgttagtgagtgtcgctattttgttattaaatggtgggcattttgcacaagaaattaattttacctcgtcaccgaatccgggttatcactccggcctggcaatgttgtcatttgtggtatttgctatttttgcgtacggcggtattgaggctgtcggcggactggtggataaaaccgagaaaccggaaaagaattttgcgaaaggtattgttttcgcggctattgtgatttcaattggttattctttggcgatctttttatggggcgtcagcactaactggcaacagatattaagtaatagcgccgttaacttagggaatatcacctacattctgatgtcgagtttaggcacgacattaggtaacgcgttaaacctttctccggaagcagcgatgacggtgggcgtctggtttgcgcgtatcaccggcctttctatgtttctggcttataccggcgcgttttttacgttgagctattcaccgctgaaagccattattcaggggacgccaaaagcgttgtggcccgcgccgatgacgacactgaacgctaacggtatgccggcgaccgctatgtggctacagtgcgtgctggtgagtctgtttattttgctggtctcttttggcggtgacaccgcatcggcgttttataacaaactcacgctgatggcgaacgtctcaatgaccttgccatacctgttccttgcgctggcatttcccttctttaaagcgcgtcaggatctggagcggccatttgttctctttaaaaccaaagcctctaccctggtcgcgacgggtgttgtggtgctggtggtgacgtttgccaacgtctttaccatcatccagccagtgattgaagctggggactgggacagcgccttgtggatgatcggcggcccgatcttcttctcgctgctggcgatggcgatttatcagaattacagtagccgcatgagcgccgatccggagtgggcggcggagtaatctttgtccggatagcgttagctcatcggctttatgaaaaggatatttataatgagtccgaaaatgtttgcgttgtgcgctatctggattttactggctatcccactcatcgctgtattttcagtcctggataaagagtggatgattggcgagagtgggataaccaacatttgtgatgtgatgagaactgtcgaaaatgatgattccagaagttttggcgcgatgatgacgctgcccctgtttttcccatttttttacgttactgtgtataagaaaatacgtagttggtttttgtactgtgtcgcgttggtgatatttgcttactggtcctggcaattcttcctgcgctatcagttttgtgtgtgatctatgctaaaagacctgataagcctatgtcatcgagtcttttagcgtcatccggcgccattgcgtttacaaactccccgccgggcggctggttttacccgctgacgttaacgttctccccgtttgtttaccgccgaggctctccagacgcatctggaacggcgggaacggcatatcaataccgtgttcgcggaagccagccagaatcaattggtggatctcatggcgtaatggcatacggtgtcccatttccgcggcatagatacgcagttcgaaaatctgaataccctgctggagatccaccagaaagatttcaggcggcgggttatcaagcaccaaagaacagcgctgcgccgccgtcagcagaatttgcgtcacctcttcgctattggcatccgctggcgccgggatggttaacaccacgcgcgtaacggagtcagacagcgaccagttgataaactgttcggtgataaaggctttattcggcacgataatctctttacgatcccagtcactgatagtggtggcgcgggtattgattttggtcacgctgccggtgagatcgcgaatggtcaccgtatcgccgatacgaatcggcttttcaaacaaaataatcaggccggagataaagttagcgaaaatttcttgcaggccaaaaccaagcccaacgccgagcgcggccaccagccattgtagcttcgaccactcaatgccgatcatcgagaaaccgaccagcccgccaatcagcattaacagatatttggtgatggtcgtgatggcgtaaccggtaccaggcgttaaatcgagatgctgtaataacgccagttccagcagcgcaggcagattacgcaccaactgcgtggtgatgataaagaccagaatcgcaatgagcaccgcccccagagtaattggctccaggctttccacgccttgcaccgtagaggtgacatcccacagcgaaatattctccaggaagccgaatgccgagtggatttccgaccacagtacaattaccgatagcagggcgataagcatcagaattgagcggaccagacgcagcgactgggcgctaatagcgtcaagatcgatttcactttcatcgatgtcgaccgcgccttccaggctggaggagtgcgccggttcttcttcgccgcgcgcgcgctgcgccagcatttccgcccgacgatgtttggcgcggtcaaaagccagtcggcgtcgttggatcagcatccagcggcgaatgacatgataaataaccagcaacaggaaccagatggcgaccgaggtttccagtctcgccagtagcgcctgcgctgtggccagataacccaccgccgccgccagaatcgcgataagcggcgcgcccatcaacatattccacagcaggctgttgaccatgttgtcgccgttgccttctttatcaagatagagcggaatgcccgcttttttcagactcagcgtgaccagcgccagcgcgccgcatatcaggatgaagcaaaggcggcccaacgagccggaaaactcccgatcgttaagattatcaaacatgatcactgccataatgagcggcacgatcagcccaatgctcatcaggtagtagcgcatcgctttcgctacccggtttcgcggccagccgaaatgcgccacaaacagaccattagggcgggcaaaagcggcgcaaatcatgactacccacaacagcggtactgtcgccgtcacgccatcgccgatggcgacggccagcggatacggccaggcttcctgtagaccatagccgagcgtcgcccacaagacgggcagcggcgaggcgaccagaatcgaccagaacaccgttcgcagcgtcagcgagaagtgatcctgggtgactttcccgacgcgcgaggccgagcgttcaaggaaccggttgaagtgttgacgtgaatagaggctaaacccgaccagcgccagcgcgccgaataacggcagtagcgtctctttgctggtcagcatcatgatgctggctttacctaactgattaaacgtatctaatgagataagccgacgtaaatcctgaaccaaatcaacaggccaggagagcgatagcgggctaacgtcagcggtccagaacagataacggtgggtcgcttcattaacctctttaagcgcatcctccagttggctgttggagactttcagtttggtcagctccaggatcagcgtgtcgccgccctgtaacaacgagttgagcagctcgcgctgagtgcgaagctgggcgtcaagaatctggttttgctcggcggtcagcggctgtccattggcctgacgtatttgccgtagctgcggctgcttattgagtaactcttcatagcgcatacggtggacgcgtagctgcgccatttccgtatcaagctgctgcggcttaggcatctctggcagacgggcgacctgcgcgcgcagcgcttcgccaagcatgttggacacgccaagccattgcgactgctcccgcagcgtattgagcgcctgacgcacctgtaacgtttggctggtggcctgtcgctgctgcgaggcgaccagatccatccgctgcgcttgttgattaagcgcctgtgacagctcgcggttgactttaaattgttcgacgatgccttccggcaaaccggcgctgttttccgccagcagctcagtactttccagcgcgcgttccgcttcacgttgacgcaggctgttgagctgattgcgcagcgcctgaagatacgcatccaattgctgactctgtttttccgccagctcggaacgcagacgagccagttcctgccggttgttggcggacagttgcgccaactccagttcgtcgactaacgcttttagtttggcggactccgcctgcatactgagactttgcgcctggctaagcgcggcacttccgcctgcggcgccgagtcgtcgctcaatctcattaagctggcggcgggcgtcgttttgctgttggggaagctggctgagcgagtcggcgatctccctgacgcgctcctgctcctgttgcgcctcgcgggttttatctagtagctggctgctaacctgcaagatctcctgatttaacgcttcggtggacatctctggcggtacgctgcgaggttcatcgcgcagattattcaactgggcgcgcaaggtggcggatagcttagggaaattatcaataacgtgttgatattgtttcgcgcgctcaagcgagccttttcgctcttcaagcgcgtttaacgcagtctggagcgcctcaacggcttccggctgagcgggcttcgccgcttttgcctgctccagttcctgcgtgatttgtttggcgtcgggggccgttgcggcgaacgcccccgtgctgaggcaccaggccatcagaaaagcgataatcaggcgcacgtcagcattctctcttgattaggtgtcgtcttttttattgtcaaccagcgggctggcgtcgtgttcggctttaatttcttctgccggcagcggagcaggttctacctccggcgcgacgaatgtttcggtcgacgtcgccagcggttggccaattttggtaacggacaggcttgccagcgacgcgatcagattcacttttcccggcgcaaataagttgatgaccgtggaacccagtttaaagcgtcccatctcctggcctttcaacagggcgacagacccttcatgttcgccttctggccaggtccagcgcttgatgatgccttcgcgcggcggggtaatggtccccgcccagacggtttcgatactgccgacaatagttgcgccgaccagaatctgcgccatagggccgaactcggtatcaaacaggcagataacgcgctcgttgcgggcaaacaggttggggacgttttgcgcggtcagatggttaacggagaacagatcgcccggtacgtagatcatttcacgcaggatgccgttgcatggcatatgcacgcgatggtagtcgcgaggggagaggtaagtggtcacaaacgtgccgttgcggaacttatccgccatcaggtagttacccgccagcaacgcctcaaggctgtaattatggcctttggcctgcaaaattttatcttcttcgatacgacccaactggcttatcacgccgtcggcaggcatcaccaggatgttaggatcggtattgagcggacgcacgtcatcacgcagcggacgaacaaagaaatcattgaacgtacgatagctggcggtatccggtttttgcgcctcggtcatatcgactttgtaatactttacgaagagatcgataaccagttttgtcagccatcctgctcgtttgcttgcgccccagcccgccaggcgagtgagccatagtttcggcagaatgtattgtagcgaaagtttaaatgagtttaacaaggtagcctccaggccattgttgttcctgaaccggcagttataccggtatcctgaaaaaaggggacgattctaacgacgcctagcgtatctgtcagtcgtccgtatcagaaaagtttttacgcgtttttacctgcgccatactttcaagaattcggtgataattttcgaaacgggtttccgcaatagcgccgttctctaccgcttcgcgaatggcgcagcctggatcggcgtcatgcttgcagtcccggtatttgcaatgtcccaaatagtcatgaaattcgacaaagccctgggtgatttgttccggctccagatgccataagccgaactcgcgcacgccgggggaatcaatgacatcgccgccatgcgggaaatgatacagacgagcagcggtagtggtatgttgacccagaccggagacattcgacacatcgttcgtcagaatctcgttctgtaagccgagcagagcgtttagcagactggattttccgacgccggactgcccagcaaaaatactgatgcgaccggttaacgcctcttccagcggtttcagaccatcctgcgtatggctggagaccatcagcacgcgatagccgatattgcggtagatatccatctgctcattaacgaagtccataccttcgtcgtccagcagatcaattttattgagtacgataagcggctcaacctgtagggtttcacagccgaccagatagcgatcgatgatattcagcgacagctccggcaaaatcgcggagacgataacgatttggtcaatgttggcggcaataggcttcacgccgtcgtagaagtccgggcgcgtcaataccgaggtgcgctcatgcaccgcttcaacgatgccttttacgttgacgccctctgcggcggctttgcccggacgccagacgacgcgatcgcccgtcaccagcgaacggatagtgcggcggatattgcaacggtgaacctcgccgtcagcagactccacatcggcatgcataccaaaacggctaatgacgataccttctgcaggctcgccaaacaggttgtcatcgtagtcggctttctccgcggacgtttttaaacgacgctggtgattggcgttcacacggcgctgctggcctttggagagtttatttttgctcaatcgtactggctcctggtcgcccatagtgggcaaaacatctatgatacacgcaattgtagatgaatatagtcacagtgaatgtgacctctgaagggtggaaaatagcatgagtgccgatgaaaacaacctgatttggatcgatctggagatgacaggtctggaccccgagcgcgatcgcattattgagatagccacactggtgacggatgccagcctgaacattctggcggaagggccgacgattgcggtacatcaatccgatgcgcaactggcgttaatggatgactggaacgtgcgcacccataccggtagcggcctggtagatcgcgttaaggcaagtacgatgggcgaacgagatgctgaactggcgacgattgaatttctgaaaacgtgggtgcctgcgggtaagtcgccgatttgcggtaacagcatcggtcaggatcgtcgttttctgtttaaatatatgccggaactggaggcctacttccactatcgctatctggatgtcagtacgctcaaggaactggcgcgccgctggaagccggagattctggccggctttaccaagcagggcacgcaccaggcgatggatgatattcgcgagtcggtggcggagctggcttactaccgcgagcatttcattaagctgtgaggcgtaacatgccggatggcaacgccagagcgtctcatccggcagctctccccacactgaattactgcgtaaaccatttctcctgcatctgcgcatattccggcgacgctttcaccttgtcgagcgcggcattaatttcttgcaatagcgcgtcgttgtctttgcgtaccgcaatgcctaacccttttccgtagtagtcaggatcgctggcgcgttcatccatgatggcgtaatccggattgttttttagccacttaccaatcgcggcgacatcgccaaacacgccctcaagacggttgtttttcagatcggtaaaggcgtttagatagctgtcataggcgacaggcgtgatagcttgttgtttatcctgcaaatagcgctgatgcgttgtaccgttttccagaccgacttttttgcctttcagatcggcaaaagtgtgataagcccctttacgcgtgacgactaccgccgatagaccttcgtaatagggttggctaaaggagacctgctgctcacgtttgggcgtcatatccataccggcgatcaccgcatcaaactttttgaagcgtaggctggggatcagactatcaaagctctggttagtgaatgagcactccgcttgcatctctttgcagaccgcgttggcgacatcaatatcgaaaccaacaattttattatcggcatcgacaaactcatagggcgcataggtggcggaggtgccaaaatgtaatgttctggcggaaacggaagcggcgtgaacggagaggctggctaacagcatgacaataagtttttttttcatcttgatccctgatatcaattggatgttgtggtcaccgtgctattctttttttggcgcagggtgctattctgattctgtgcctttaggcgtggcgtgaaaagttttttgttgcatagcgcacgctttgctcgttttttgtcttgtttggtgatttaatcagcattcaaacaaaaatcgcgaaaaaatgcgttcaggggcttgcagctaaatggatttctcgtataatgcgcctcccgtaacgacgcagaaatgcgaattacgacagcaacaaatttgcgggaatagctcagttggtagagcacgaccttgccaaggtcggggtcgcgagttcgagtctcgtttcccgctccaaaatttgaaagtacttgttaagtacaaaccaccaatcgcaggatttcgaattgcgacaaggcggcaactgaacgagtcctcaggagcttactgaagtaagtgactcaggcgagtgaaggcagccaacgcagtagcggttcgaaagacgaagattatgcgggaatagctcagttggtagagcacgaccttgccaaggtcggggtcgcgagttcgagtctcgtttcccgctccaaaatttgaaagtgcttgttaagcacagaccaccaatcgcaggatttcgaattgcgacaaggcggcaactgaatgagttctcaggagcttactgaagtaagtgactcaggcgagtgaaggcagccaacgcagtagcggttcgaaagacgaagattatgcgggaatagctcagttggtagagcacgaccttgccaaggtcggggtcgcgagttcgagtctcgtttcccgctccaattcttatctacagtaaaattatccacaacgaatatcgcgttggggcacgttttgttccgctttcgtcagatccttgtaaacagacttatccacagggcggcccattactcctggaatgcaaaaaattatacctgacgcgtagaatttctataatttactgaaaaatatagaaaaaataagatttcaaaacgttagctttattgactattccttttttccctcttgaatcgcaatgtgtttttatttttatacacagcctgtgaataattcaggcatcgcgcaccagccctttttcaatcaccctgaccagacgctgttttttcggtagctgcacttcaatgatgcaggcgttgcgcttttcaatttgttgcgcaatcgcccattcgatatgctcatcgagaagtggatgctcacccttgcggctttccagcgccgtaatgacggcattactccacggcgcattccccagcgcgacggcaacattgcgcagccagcgtaaatgaccaatgcgccgaatcgcagaaccttcagtgactttcagaaactgcgcttcgctccagctaaacaactcaagcaaatctggattatgcagcgccttgcgtgggctaaaatctgcttcgtcggtcaactgagagtaacgattccacggacagataagctggcagtcatcgcagccgtaaatacggttacctatcagtgggcgaaatgcttccggaatagcgccttccagctcaatggtgagataagaaatacagcgccgcgcgtccaccgtatacggttcgacgatcgccccggtcgggcaaatggtcatacaggcgacgcatttaccgcaaccttcctcgaccggctggtcgaccggcagcggtaaatcaatcagcaattcccccaggaaaaagaatgagcccgcctcccgattaaggataagtgagtgcttacccgtccagccaagtccggctttttccgctaatgggcgttcaagaataggcgcagagtcgacaaacggtctaaaattcagcgaaccgcagtactgctggatctgctcgcccagttttttaaggcggctgcgtaatagcttgtgataatcacgccccagcgcatatcggctaacgtagcccagcgtgggatccttcaacgtactggcaaacgcggcgttggcgggcagatagttcatgcgcacgctgatgacacgtagcgtaccgggtaagagttcatgaggccgggcgcgcatcataccgtggcgcgccatccatgccatctcgccgtggtattgtttgtccagccacgcctgcagcgcaggttcggatgcgcgcagatcggtatcagtaataccgacctgctgaaagcccagctccagcccccactgcttaatattttgcgctaactgattgagatcgaggggctttgacatgatggaccataacatgaagaaaaaccctgtaagtataccacactccatttggcccgccgatgacatcaaacggctggaacgcgatgcggcggatgccttcggactcacactctatgaattgatgctgcgcgctggcgacgcggcatttcgggtagcccgtgacagttatcctgacacccgacactggctggtgttgtgtggtcatggcaacaacggcggcgatggttacgtcgtggcgcgactagcgcaagcggcgggcattagcgtaacgttgctggcgcaggagagcgacaaaccgttgcctgaagaagcggcgcaggcgcgcgatgcctggctgaatgccggcggcatcatccatgctgccgatattatctggccggaagcgacggatctgattatcgacgcgctgcttggcaccggcatagcccaggcaccgcgcgacccggtagccggtctgattgaacaggcgaacgcccatcctgcgccggttgtcgccgtcgatatcccgtcaggtctgctggcgcaaacgggcgccacgcctggcgcggtgataagcgccgcgcatacggtcacgtttatcgccctgaaaccaggcctgctgaccggcaaagcgcgtgacgttaccggcatattgcattatgacgcgttgggactggaaggctggctggcgagccagacgccgccgctccggcgttttgacgcgacgcagttggggcaatggctaacgccgcgtcgaccgacctcgcataagggcgatcatggtcgtctggcgattattggcggtgaccagggaacagcgggcgcaattcggatggctggcgaggcggcgctgcgtacgggggctgggttggtcagagtactgactcgcggtgaaaacatcgcgccgttgctgacggcccgcccggaactgatggtacatgaactcacgcctcagtcgctggaagagagcctgacctgggctgacgttgtggtgatcggcccggggcttggacagcaggaatggggcaaaaaagccttacagaaagtagaaaacgtccgtaaacctatgctgtgggatgcggatgcgttgaacctactggcaatcaatcctgataaacgtcacaatcgcgtgattacgccgcatccgggagaggcggcccgcctgttaggatgttctgtggcagaaattgaaagtgatcgcttactttcagcacagcgtctggtaaaacggtatggaggcgtggtcgtgttaaaaggcgcaggaacgattatcgccgctgaacaccaccctctggctatcattgacgctggtaatgcggggatggcgagcggcgggatgggcgatgtcctgtccggcatcatcggtgcattgctcggacagaagtttaccccgtatgatgcggcatgtgtgggatgtgtggctcacggcgcggcggcggacttactggcagcgcgttatggcgctcgcggcatgttggcgaccgatctttttactacgctgcggcgtattgttaaccctgatgtgattgacgtaaaccatgatgaatcgagtaattccgctacctgacgaacaggcgacgctagacctggggcaacgggtagccaacgcctgcgatggcgcgaccgttatttatctgtatggcgatttaggtgccggtaaaacgacgtttagccggggatttttacaggcgttaggccataacggtaatgtaaaaagccccacctatacgctggtagagccttatgcgattgataacatgatggtatatcacttcgacttataccgtcttgcggacccggaggagctggagtttatgggcattcgcgattatttcgccaacgacgccatttgtctggttgagtggccgcaacaaggtaaaggcgttctccccgacccggacgtcgaaatccatattgattaccaggcgcaggggcgtgaggctcgcgtaagcgcggtatcctcatcgggtcattcgttactggcgcgtttagccgattagctataaaggtggcgggatgatttatcgcatcaaaaatgccgtaatagcagccttaatcctgctgtgcgcgcaggcgggcgccgccagtctctctgatattcaggtgtccaacggcgagcagcaggcgcgcattacgctgagttttatcggcgagccggaatatgcttactcacaggacggtaaacggactgtggcgctggatatcaggcagaccggcgtgattcaggggctgccgcttcagtttagcggtaacaatctggtaaaaacgatccgtgctggaacgccgaaagatgcgcaatctttacggttgcttgtcgatctgacggaaaatggtaaaaccgaggcggtgaagcggcaaaacggcggcaactatacggtcattttcaccattaatgccgatgttccgccgccaccgccgcctgtcgtcgcgaaacgggttgaaagcgcgcctcgcccgacggagccggcccgtaatccgtttaaatcttctgatgatcgcctgaccggcgtaaccagcagcaataccgttacgcggcctgcggcgcgcgcgtcggcaggcgctggcgataaagtggtgattgctattgatgccggacatggaggccaggaccccggcgcgataggcccgggcggtacgcgcgagaaaaatgtcaccatcgccatcgcgcgtaagttacgcacattactgaataacgatccgatgtttaaaggcgtgctgacgcgtgacggcgactattttatttcggtgatggggcggtctgatgtggcgcgtaagcaaaacgccaactttcttgtctctattcatgcggatgccgcgccaaatcgcgacgccaccggcgcctccgtctgggtattgtccaatcgtcgcgcgaacagcgaaatggcaaactggcttgagcagcatgagaagcaatccgaactgttaggcggcgctggcgatgtgctggcgaacagtcagtcagacccttacctgagccaggcggtactggatttgcaattcggtcattcgcagcgggtagggtatgatgtggcgacgaacgtactaagccaactcgacggcgtggggtcgctgcataaacgccgcccggaacacgctagcctgggcgtgttgcgttcgccggatatcccgtccattttggtggagacgggctttatcagtaatcacggcgaagagcgattgctggcgagcgaccgctatcagcagcagattgctgacgctatataccgggggttgcgtaagtactttgcagcgcatccgatccagtctgcgccgcagggcggcccaggccagacggccagtaccaaccagcctggcgccataaccgccgcgaattaaggagatttcatgccgattcaggttctgccgccgcagcttgcgaaccaaatcgccgctggcgaagtggtggaacgccctgcgtcggttgttaaagagctggtagagaatagtctggatgcaggcgccacccgcgttgatatcgacatcgagcgtggcggcgcgaagcttattcgtattcgcgacaatggctgcggcattaaaaaagaggagctggcgctggcgctggcccgtcatgccaccagtaaaatcgcctcgcttgacgatctggaagcgattatcagtctgggatttcgcggcgaagcgctggccagtatcagttcggtctcgcgtttgacgctaacgtcgcgcacggcggagcaggcggaagcctggcaggcgtatgcggaagggcgcgatatggacgtgacggtaaaacccgccgcgcacccggtcggcaccaccctggaagttctggatctcttttacaatacgcccgcccggcgcaaattcatgcgtaccgaaaaaacggaatttaatcacatcgatgagatcatccgtcgtattgcattggcccgttttgacgtcacgcttaacctgtcgcacaacggcaaattggtacggcagtatcgcgctgtcgcaaaggacgggcaaaaagagcgccggttaggcgccatctgcggcacgccgtttctcgaacaggcactggcgatcgagtggcagcatggcgatctgaccctgcgcggctgggtcgccgatccgaatcacaccaccacggcgttaacggagatccagtactgttatgtgaatggccgcatgatgcgcgaccgcttgatcaaccatgccattcgccaggcctgtgaagataaactgggcgcggaccaacagcctgcgtttgtgctgtatctggagattgacccgcatcaggtggatgtcaatgttcatcccgccaagcacgaagtgcgttttcatcaatcccggctggtgcacgacttcatctatcaaggggtgctgagcgttctgcaacagcagacggaaacggcgctgccgctggaggagattgcgccagcgccgcggcatgtccaggaaaaccgtatcgccgccgggcgcaaccattttgctgtacccgccgagccaactgcggcgcgcgagcccgcgacaccgcgttattccggcggcgcatcgggcggtaacggcgggcgtcagtccgcaggtggttggccgcacgcgcagccaggttatcagaagcagcagggcgaggtttatcgcacgcttttacagacgccgacggcgagccccgcgccggagtcggttacgcctgcgcttgacggacatagccagagtttcggtcgcgtactgacaatagtcggcggtgactgcgcgttgctggaacacgcggggactatccagctcttgtcgctaccggttgcggagcgttggctgcgtcaggcgcagcttacaccgggtcaaagtccggtttgcgcgcagccgttgctgattccgctgcgtttaaaagtgagcgccgatgaaaaagccgcgctgcaaaaagcccaatctttgttgggagaattgggtattgaatttcagtcagatgcgcagcatgtgaccattcgggcggtgcctttacccttacgacaacaaaatttacaaatcttgattcctgaactgataggctacctggcgcaacagaccacatttgcaacggtcaatattgcacaatggatagcgcgtaatgtgcagagcgaacatccgcagtggtcgatggcgcaggccatatcgctgctggcggatgttgagcggctatgtccgcagctggtaaaagcgccgccgggtggcctgttacaacctgttgatttacattcggcgatgaacgccctgaagcatgaatgatgtaagcaaggcgagcctgcctaaggcgatatttttgatggggccgacggcctccggcaaaacggcgctggcgatagaactgcgtaaagttttgccagtagagttgataagcgttgattccgccctcatttatcggggaatggatattggcacggctaagccgaatgccgatgagctgaaagcggcgccgcatcgactgttggatatacgcgacccgtcgcaggcgtattcggcggcggattttcgccgcgacgcgttagcgcaaatggcggagatcaccgctgcggggcgtatcccgctgttagtgggcggtaccatgctgtattttaaggcattgctggaagggttatcgccgctgccttcagcagatccggaagtcagatcccggatagagcagcaagcagcggagcttggatgggaggcgttgcatcagcaacttcaggagatagatccggttgccgccgcgcgaattcatccaaatgatccgcaaagactttcccgggcactggaagtttttttcatttcgggtaaaactttaacggagctaacgcaaacgtcaggagacgcgctaccgtaccaggtgcatcagttcgctatcgccccggcgagccgtgaactgctccatcagcgcattgaactgcgttttcatcagatgttggcttcaggttttgaagcagaagtccgggcgctttttgcccgaggagatttgcatacggacttgccttccatccgttgtgtgggataccgccagatgtggtcatacattgagggcgaaatctcatatgatgaaatggtttatagaggtgtttgcgccacgagacagttggcgaagcgccagatgacctggttgcgcggttgggaaggggtgcgctggcttgacagtgagaatcccgatcgggcgcgaaaagaagtattacaggttgttggtgctatcgcagactgaatgtgtacaattgagacgtatcgtgcgcaatttttcagaatcgaaaggttcaaagtacaaataagcatataaggaaaagagaatggctaaggggcaatctttacaagatccgttcctgaacgcattgcgtcgggaacgtgttccagtttctatttatttggtgaatggtattaagctgcaaggtcaaatcgagtcctttgatcagttcgtgatcctgttgaagaacacggtcagccagatggtttataagcacgcgatttctactgttgtcccgtctcgcccggtttcccatcacagcaacaatgccggtggcggcgccagcaataactaccatcacggtagcaacgcgcaggggtctactgcgcaacaggacagcgaagagactgaataagttcacgcgctgtttatccatgtcgggggcgtcggataatcgcccccgctggttattaagagggtttacgcttgtttgaccgttatgatgccggtgagcaggcggtactggtacacatctatttttcgcaagacaaagatatggaagacctccaggagtttgaatctctggtctcttccgccggtgtcgaagcaatgcaggtgattaccggtagccgtaaagcaccgcacccgaagtactttgtaggtgaaggtaaggcagttgaaattgcggaagccgtgaaagcgactggcgcagcggtcgtattgtttgatcatgcattgagtccagcccaggagcgaaacctggagcgtttgtgcgagtgccgggttatcgatcgcaccggtcttatcttagatatttttgcccaacgtgctcgtacccatgaaggtaagttgcaggttgagctggcgcagctacgccatctggctacgcgtctggtgcgtggctggacccaccttgaacgtcagaaaggcgggattggtttgcgcggtccgggtgaaacccagctcgaaaccgaccgtcgtttactgcgtaatcgcattgtgcagattcagtcgcgcctggagaaagttgagaagcaacgtgagcaggggcggcagtcgcgcatcaaggccgacgttccgacggtatcgctggtgggctataccaacgccggaaaatccaccctttttaatcagatcactgaagcgcgggtctatgcggcagatcagctatttgcgacgctggaccccacattacgtcgtattgatgtagcggatgtcggtgaaaccgttctggcggatacggtaggctttatccgccatttaccgcacgatctggtggctgcctttaaagctaccctgcaggagacgcgtcaggcgacgctgctgctgcatgtggtcgatgcggcggatgttcgtgtgcaggaaaacatcgaggcggtaaacaccgttcttgaagagattgacgctcacgaaatccccaccttaatggtgatgaacaaaatcgatatgctggacgactttgaaccgcgtatcgacagagatgaagagaataaacccatccgcgtttggctttcagcgcaaagcggcgtgggaataccacagctttttcaggctttgacggagcgtctttccggcgaggtggcgcagcatacgctgcgtttgccgccgcaggaagggcgtctgagaagccggttttatcagcttcaggcaatagaaaaagagtggatggaggaagacggtagcgtcagtctgcaggtacgaatgccgattgtcgactggcgtcgcctctgtaaacaagaaccggcgttgatcgaatacgtgatctagacgcgaagtcattcaggtcgtattgaggcggtagctgagagaatctcaggagctcacaacgaagtgacctggggtaaaaaagccgccactcaagacgcagcctgaaagatgatgtctgtaacggcggttcgtctgaagcatggagtaatttcgccttatcctctgaggtcgaaagacaacggggatcaccgcataacaaatatggagcacaaacatggcgtggaatcagcccggtaataacggacaggaccgcgacccgtggggaagcagcaaacctggcagcaactctgggggaaatggaaacaaaggtggccgcgatcagggacctcccgatctggatgatatcttccgtaagctgagtaaaaaactcggtggttttgggggcggtaaaggcaccggttccggcggcggtagctcatcgcaaggcccacgtccgcaactgggaggccgtattgtcgccatcgccgcggcggcagtagtcattatctgggcggccagcggtttttataccattaaagaagccgagcgcggcgttgtgacgcgttttggtaaattcagccatctggtagagccaggtctgaactggaagccgacatttattgacgacgtcacgccggtgaacgtcgaagcggtgcgcgaactggcggcgtcaggcgtgatgctgacgtctgatgaaaacgtcgtgcgcgttgaaatgaacgtgcaataccgcgtcaccgatccgcagaaatatctgtttagcgtgaccagcccggacgatagcctgcgtcaggccaccgacagcgcgctgcgtggcgtcattggtaaatacacgatggatcgcatcctgaccgaaggtcgtaccgttattcgtagcgatacccaacgcgagctggaagagactatcaaaccgtacaacatggggattaccctgctggacgtgaacttccaggctgcgcgcccgccggaagaggtgaaagccgcctttgacgacgcgattgccgcacgtgaaaacgagcagcagtacattcgtgaagcggaagcgtataccaacgaagttcagccgcgcgccaacggtcaggcgcagcgtattctggaagaggcacgcgcctataaaacccagactatcctggaagcgcagggtgaagtcgcccggtttgcgaagattttgccggaatataaagccgcgccgcagattacacgcgagcgtctgtatattgaaacgatggaaaaagtgctgagccatacccgtaaagtactggttaacgacaagagcggtaatttaatggtgctgccgttagatcagatgctgaaaggcgggaatgcgccggcggcaaagagcgacaatagcgccagcaacctgctgcgcctgccgccgtccacaaagtctaacgccagcggagcaagcaacacgtcgtcctcaaatcagggcgatattatggaccaacgccgcgcgaatgcgcagcgtaacgactaccagcgtcagggggaataacgatgcgtaagtcagttattgcgattatcatcatcgtgctggtagtgctctacatgtccgtctttgtggtcaaagagggcgagcgcggcattacgctgcgttttggtaaagttctgcgtgacgatgagaacaaaccgctggtttacgcgccgggtctgcactttaagatcccgtttattgaatcagtgaaaatgcttgatgcgcgtatccagacgatggataaccaggccgatcgctttgtgactaaagagaagaaagacctgattgtcgactcctacatcaaatggcgtatcagcgactttagccgttactatctggcgaccggcggcggcgatatttcgcaagccgaagtgctgttaaaacgtaagttctcggaccgtttgcgttctgagattggtcgcctggacgtaaaagacatcgtgaccgattctcgtggtcgtctgactctggaggtgcgcgacgcgctgaactccggttcagccggtaccgatgatgaagtagcgaccccggcggcggatgacgcgattgccgaagcggcggaacgcgtcacggcggaaaccaaaggtaaagtaccggtcatcaacccgaacagtatggcggcgttgggtatcgaagtggtcgatgtgcgtattaagcagatcaacctgccgaccgaggtttctgaggcgatttacaaccgtatgcgcgccgagcgtgaagcggtcgcgcgtcgtcatcgctcacaaggtcaggaagaagcggaaaaactgcgtgcggctgctgactatgaggtgacgaaaactctggcggaagccgagcgtcaggggcgtatcatgcgtggtgaaggtgatgctgaagccgcgaagctgtttgccgacgcgttcagccaggaccctgatttctacgcgttcattcgtagtctgcgcgcttacgagaagagcttcgaaggtaatcaggacgtgatggtactgagcccggacagcgatttcttccgctacatgaagacaccgagttcgacgacacgctaaaatagcgtcagcggttttagaccagcaaaaccaccgcatccaaaggatgccggtggttttcttttataagggcgataaatgaattcaacaatctggttggcgcttgctctggtattagtcctcgaagggctgggaccgatgctgtatcccggcgcatggaaaaaaatggtttcggcactggcgcaactgccggaaaatgttttacgtcgttttggcggcggacttgtggtcgcgggagttgtggtctactacatgttgaggaaaacgattggctgagcaaaaagtggtcggatttgccgcagattgagtgcaaaaagtgctgtatatctgaaaaagcgatggtagaatccatttttaagcaaacggtgattttgaaaaatgggtaacaacgtcgtcgtactgggcacccaatggggtgacgaaggtaaaggaaagatcgtcgatcttctgactgaacgggctaaatatgttgtacgctaccagggcggtcacaacgcaggccatactctcgtaatcaacggtgaaaaaaccgttctccatcttattccatcaggtattcttcgcgagaatgtaaccagcatcatcggtaacggtgttgtgctgtctccgagcgcgctgatgaaagagatgaaagaactggaagaccgtggcatccccgttcgtgagcgtctgctgctgtctgaagcctgtccgctgatccttgattatcacgttgcgctggataacgcgcgtgagaaagcgcgtggcgcgaaagcgatcggcaccaccgggcgtggaatcgggcctgcttatgaagataaagtggcacgtcgcggtctgcgtgttggtgaccttttcgacaaagaaaccttcgctgaaaaactgaaagaagtgatggaatatcacaacttccagttggttaactactacaaagctgaagcggttgattaccagaaagttctggatgatacgatggctgttgccgacatcctgacttctatggttgttgacgtttcggacctgctcgaccaggcgcgtcagcgtggcgatttcgtcatgtttgaaggtgcgcagggtaccctgctggatatcgaccacggtacttatccgtacgtaacttcttctaacaccactgcaggtggcgtggcgaccggttccggcctgggcccgcgttatgttgattacgttctgggtatcctcaaagcttactccactcgcgtaggtgcgggtccgttcccgaccgaactgtttgatgaaaccggcgagttcctctgcaagcagggtaacgaatatggcgctactaccggccgtcgtcgtcgtaccggctggctggacaccgttgccgttcgtcgtgcggtacagctgaactccctgtctggcttctgcctgaccaaactggacgtgctggatggcctgaaagaggtgaaactctgcgtggcttaccgtatgccggatggtcgcgaagtgactaccactccgctggcagctgacgactggaaaggtgtagagccgatttacgaaaccatgccgggctggtctgaatccaccttcggcgtgaaagatcgtagcggtctgccgcaggcggcgctgaactacatcaagcgtattgaagaactgaccggcgtgccgattgatattatttctaccggccccgatcgtactgagacgatgattctgcgcgacccgttcgacgcgtaaatctggtacgcctggcagatattttgcttgccgggctaacagtgtgatacattgctgtgtcgggtaagccattacgctatccgacacagtgttaaatcctcgcttttttccttccccgaactgaaataaattagcgacacagcttgtggctggtttatcatcaatataaatgtatttttcccgttttcccttttcctgaggttgatgtgcagttaacgagtttcaccgattacggcttacgtgcgctaatctatatggcgtcgttaccagatggacgaatgaccagcatttctgaggtgacagaagtctacggcgtgtcccgtaatcatatggtcaaaattatcaatcagcttagccgggcgggctttgtcaccgccgttcggggaaaaaatggcggtatccgcctgggtaaaccggctaatactatttgtattggcgatgtggtgcgtgagctggaacccttatcactggtcaactgtagcagcgaattttgccacatcacccctgcctgtcgtctgaaacaggcgctttctaaggccgtgcagagttttctcaaggagctggataactacacgcttgccgatttggttgaagagaatcaaccgctttataaattattactggtggagtgaagtaaacttcattagagatgacaatggaggaacctcaatgtcacaagatcctttccaggaacgcgaagcagaaaaatacgcgaatcctatcccgagccgggaatttatcctcgaacatttaacgaaacgtgaaaaaccggccagtcgcgaagaactggccgtagaactgaatattgaaggcgaagagcagcttgaagccttgcgtcgccgcctgcgcgcgatggagcgcgacggacaactggtctttacccgccgccagtgctatgcgctgccggaacgcctcgacctgctgaaaggcaccgtgatcggtcatcgtgatggttacggtttcttacgtgtcgaaggccgcaaagacgatctgtatctttccagcgagcaaatgaaaacctgtattcatggcgatcaggtgctggcgcagccgctgggcgccgatcgtaaaggtcgccgcgaagcgcgtatcgtccgtgtactggtaccgaaaaccagtcagatagtcgggcgttatttcaccgatgcgggcgtcggctttgtggtgccggacgacagccgcctaagcttcgacattcttatcccgccagaagacgtcatgggcgcgcggatggggttcgtggtcgtggttgaactgacccaacgtccaactcgccgtactaaagcggtagggaaaatcgtcgaagtgctgggcgacaatatgggcaccggtatggcggttgatatggcgctgcgtacccatgaaataccttacatctggccgcaggcggtagagcagcaggtcgccgggctgaaagaagaggtgccggaagaggcgaaagtcggtcgtgtcgatctgcgcgatttgccgctggtcactattgatggcgaagatgcccgtgactttgacgacgcggtttactgtgagaaaaaacgcggcggcggctggcgtttgtgggtcgctattgctgacgtgagctattatgtacggccgccaacgccgctggatcgcgaggcgcgcaatcgcggcacgtcggtttacttcccgtcacaggttgtcccaatgttgccggaggtgctctccaacggtctgtgttcgctaaacccgcaggttgacaggctgtgtatggtctgtgaaatgaccatctcggcgaaaggtcggctgaccggctacaaattctatgaagcggtgatgagctcccatgcgcgtctgacctataccaaagtctggcatatgctgcagggcgatcaggatctgcgtgaacaatatgcgccgctggtgaagcatattgaagagctgcacaacctctacaaagtgctggataaagcgcgtgaagagcgcggggggatctcgtttgagagcgaagaggcgaagtttatctttaacgccgaacgtcgcattgagcgtatcgaacagacccagcgtaatgacgcgcataagcttatcgaagagtgcatgatcatggcgaatatctcggcggcgcgctttgtcgaaaaagctaaagagccggcgttattccgtattcatgataagcccaccaccgaagcgatcacctcattccgctccgtactggcggagctggggttggagctgccgggcggaaacaaaccggaaccgcgcgattatgccgaactgcttgaatcgattgccgaccggccggacgccgaaatgctgcaaactatgctgctgcgttcaatgaagcaggcgatttacgatccggaaaaccgcgggcactttggcctggcgttgcagtcttatgcgcactttacctcgccgattcgccgctatccggatctttctttgcaccgcgccattaagtacctgctggcgaaagagcaagggaacaagggcaacaccacagaaacgggcggttatcactactcgatggaagagatgttgcagctcggtcagcactgttcgatggcggaacgccgcgctgatgaagcgacgcgtgatgtctccgactggctgaaatgtgactttatgctggatcaggtaggcaacgtctttaagggcgtgattgccagcgtcaccggtttcggcttctttgtccgtcttgatgaactgtttatcgatgggctggtacacgtttcctcactggataacgattactatcgcttcgatcaggtagggcaacgtctgattggcgagtccggcgggcagacatatcgcctgggcgaccgggtcgaggtacgcgtcgaagcggtgaatatggacgaacggaaaattgactttagcctgatctccagcgagcgcgcaccgcgtaacgtcggcaaaacggcgcgtgaaaaagcgaaaaaaggtgaaagtaaaaacgccggtaaacgtcgtcaggtaggtaaaaaagttaacttcgagcctgatagcgccttccgcggcgagaaaaaagcgaagccgaaagcagcgaagaaagacgcgagaaaagcaaaaaagccatcggctaaaacgcagaaaatagccgcagcgaccaaagcgaagcgtgcggcgaagaaaaaagcggcagagtgagcaataccctcttcaaacagaagagggtcaattatctgtaggccgggcaagcgtagcgcccccggcaaaacgtaaacaacgagtacattaatgagcgaaatgatttacggcatccacgcagtgcaggccctgctggagcgcgcccctgaacgttttcaggaagtctttattttaaaaggccgtgaagataaacgtctgttgccgctgatccacgcccttgagtcccagggcgtggttatccagctggcaaaccgccaatatctcgacgagaaaagcgacggtgccgtgcatcagggtattatcgctcgcgtgaaaccaggccggcagtatcaggaaaacgatctgccggatctgatcgcattacacgatcgcccttttttgttgatcctcgatggcgtcaccgatccgcataatcttggcgcctgtctgcgcagcgccgatgctgcaggcgtacatgcggtaatcgtgccgaaagaccgctccgcgcaacttaacgcgacggcgaagaaagtcgcctgcggcgcagcggaaagcgtgccgttgatccgcgtcaccaacctggcgcgcacgatgcgcatgttgcaggaagagaatatctggattgtcggaacggcgggcgaggctgaccatacgctgtatcagagcaaaatgcctggccgcatggcgctggtcatgggcgcagaaggtgaaggtatgcgtcgtctgacccgtgagcactgcgatgagctgatcagcattcctatggccggtagcgtgtcgtcgctgaatgtctctgtggcgaccgggatttgtctgtttgaagccgttcgccagcgcacctgatgctgatagtattttttaagaaaaaaccatccataatcggatggtttttttttatctttgactggtaatataaaaaacaaaacctaccctgtaatttcttttatttataaaaatgagatagagataaaaatatggcatggactccacggacgctggcggatgcattaaacaacatcgccgaattagatattgatatagaaaataatgaatcttcattaataataaaaatgaatgattatggcgatttaccactggcggttttatttacctcgcaacaaatagttatcgagacttatatctgtccggtaaatacgattagagataccgcggaatttaatcttttcttgctgagaaatcagaaggttttaccgctgtcttcggtcggtattacccaggtaaaacaggaggaatattatgtcgcttttggcgcgctgtcgttaaattcgtcgcttgccgacgtgatgctggaaatcaccacgcttgtagaaaatgcgttggatatcgctgaaataacacaagtctattcacaggaataatacaggcggcttacatgggaattttaaaaagtttgttcacgttaggtaaatcattcgttgctcaggcagaggaagccattgatgaagcacagggtgtacgtatgctggagcagcatattcgcgacgcaaaagccgagctggataaagcgggtaaatccagagtggatttattggcgcgggtgaagctaagccatgacaagctgaatgatttacgtgagcgtaaagccagccttgaaacacgggcgttggcggcaatgagtaagaatgtcgacgccgctttactcaacgaagtggcggaagaaatagcccgtctggaaaatgccattcttgccgaagaacaggtgctgactaatctggaagcctctcgcgatgcggtggagaaggccgtaacggcgacaggccagcggattgcgcagtttgagcagcaacttgaagtggttaaggcgacagaagccatgcagcgcgcgcagcaggcggtgacgacctcgaccgtcggagccgcgtcgaatgtgtctacggcggcggagtcgcttaaacgtttacaaacgcgtcaggctgaacgccaggcccggctggatgccgccgcgcagctggaaaaagtcgccgatggacgcgacctggatgaaaaactggcgcaggccggtattggcgcaaccaataaaagcaatgctcagggtgtgttggcgcgtttacagcgtcaacaaggcgaataatgctctttacgtggattgtcaaaacctgccagcgtcatttgtccagactgacctggcccgctttgctgggcctgtttatcgggcagtatctgctttgttatctggtgctgcgcctgttgcgcgaaagcgcgttggtgagccagttaagcgattttatctattactgctcggtggtgggttccacattaggttttggcgatcttagcccgcagacggcgccaggacgtctgttcaccgcgctgtggcaaattccggttagcgtcgggttgttcggcgcgttaatgggaaaagtgattgcgcaggtacagggaatgttagcgaaaggaataacgggcatgggcgattatcgccatttacaccatcatatgctggtgattggctggcggggtcatcaaaccgaaaagatgatctcattgctgctatatgacaagcggcgtgcctttgaacgggttctgctgtgcgaactggaagatattcagcatccgctgccgggtaataactgggtggattttatccgcatcagcaactttaacgatccgcaggaacaccagcgcatggggctggagcagtgccagagcgtgattattttcgctcgtaccgatgagcagaccttcacggcggcgctctcgctggcagactatgtacccgcgcagtgccatattgtggtttatctggaagacgagcgttatgccggattactggaaacccactgcccgcgcatggagatagtccgtaacctttccgctgaacaactttcccgttccattcaggacccaggatcatcgcaatctgtcgcttccattatgaatccgatgctgggcgataccggattcgcgctgcctgtcccggcttctgtcgcgcctatgcgatacggcgcgctaatgcgttatatgaagcttcatcatgacgcgacggtgctggggatcagtcactgcaagaatggtcgtggtatggaattgaatccggtgatttcaactgaagtcagaggcggtatgtggctacatctggtcggtaataatcgcattctggctgaagaggtcgcatggcaagagatagaggttcccctatgatgcaattttttcagcgtttgctcggtaaaacaagcgcgccagcgccgattcgcggaccattaggattacatcttaacgccggtttcacgctggatacgctggcatttcggctactggagtcgtcgttgctggtggcgctaccgggtgaaaaatacactgtcgcggcagcgagtcgcatagatttaggcggcggcagtcagatttttcgctactacacctctggcgatgagtttctacaaattaacaccactggcggcacggatgttgacgacattgatgacatcaaactttttgtatatgaggaaagtttcggtattaacgaggaacgtcactggcgttcagccattgcgccagcggcaatagggccgatgacgctcaactggcaagaacggcgctggcagcgcttttttaaccatgaagagccgggcaatattgaacctgtctacatgctggaaaaggttgaaaatcagcaggcagagaaatgggacgttcacaattttacgatgggcttccagcgccaggtgacggatgacgcctgggagtatcttctattgaacggggaagaatcatttaatgagcgcggtgagcctgaatgggtgttttcacgcgccctcggcgtggatatcccgctcacttcactgacggttattggttaagcacatacagggaaattatgcatatactggacgcattactggctttctgcgcctatttttttattggcgcggcaatggtcattgtatttctttttatttactcaaagataacgccgcataatgaatggcagttgataaaaaataacaatactgcggcatcgctggcctttagcggtacgttgctgggctatgtcatccccttatccagcgcggcgataaactcggtcagtatcccggactattttgcctggggcggcattgcgctggtgattcaactgctgatttatggttgcgtaaggttatacatgcctacgctgagcgaaaaaattattcatcacaacgtggcggcggggctatttatgggaaccgcagcgctggctggcggtatttttaacgctgcctgtatgacatggtaacggaagatcatggcaaaaaaacgaaaatccagaagcacatccggcgtaggccattcggcaataagacgaatagccgaaccggtcaatccctttgagcggcaacgaaatcgctacacgccaaaatgcctgacgctggcgattatgggtggagcggccttttttctcctgaaagggtgcggtgatggcggcaatagtgacaacgacggcgatgggacgttttacgccacggtgaacgactgtattgacgatggcaatagcgccagcgtttgcgctgacggctggaataatgcgaaaacagaattttacgctaatgtgcctaagcaattgacgcaggagcgctgtcagacgcagtttggcgattgctactttgatattaccgagcggagctgggttccggtattaagcggctttttactcagccgcgcgattcgtcagaaccgtgatgaacaatacatctatagcagcggcggttcatcttatgtctcccgtcccgtctggcgcaccacatccggcgactatgcgtggcgcagcggcacagggaaaagcgataccgcgaccagccctggttatatcacacggaaagcgtccaccgtctcccgcggcggctatggccgttcttccagcgcccgcgggcactggggaggctaaccatgctacgacacaacgtaccgatacgtcgggatctggataagatcgcctgcgatcacggttttgactttcatgttatcgataacgaaatttactgggatgaaagccgggcctaccgttttacattacggcaaattgaagaacagatcgaaaaaccgaccgcagagcttcatcagatgtgtctggagattgtcgagcgggccgtccgggatgagcagagcatgcagcagctggcgatcccgccattgtactgggatgtcatcgccgaaagttggcgcagccgcgatccttcgctttacgggcggatggatttcgtctggtgcggcaaagatccggttaaattgctggaatacaatgcggatacgccgacgtcgctctatgagtcctcctactttcaatggctatggctggaggatgcccgtcgtagcggcgccatcccgcgtgatgccgatcaatacaacgcgatacaggagcggctgatcgcccgcttcagcgagctgtacagtcgggaaccgctctacttttgctgttgtgaagataccgacgaagatcgcacgacggtgctgtaccttcaggattgcgcgcagcaggcggggcaggaaacgcgatttatctatattgaagaactggggcttggcgtaggcggcgtgctgaccgatctggacgataacgtgattcgccgcgcctttaagctctacccgctggaatggatgatgcgcgatgacaacggcccgctgttgcgaaaacgtcgtgagcaatggattgagccattgtggaaaagtattctgagtaacaaagggctgttgccgttattgtggcgctttttccctggccatccgaatcttctgccggcctggtttgagggcgaaaaatcgctcgcagcgccaggcgaaagcagcgtacggaagccgatttattcacgtgaaggcggcaacgtcacgattttcgacgagcggcaaaatgttatcgatcatgccgacggcgactacgctgacgagccgatgatttaccaggcgtttcagcctttgccgcgctttggcgatagctatacgctgattggcagttggatcattgacgatgaagcctccgggatggggattcgcgaggacaatacgctaattaccaaagacacttcccgtttcgtcccacattatattgccggttaatcatacttttgtgatcttgctccggcgtcaatggcgcagtcatgaccatacttgacttcagcgccattgaaggagggagacaccatgtcctggcaaacacataccgtctttaatcaacctgctccgctcaataacagtaacttattcctgtctgatggcgcgctgtgtgaagcggtttcccgggaaggcgcgggatgggatagcgatcttctcgccagcattggccaacaactgggaacggcagaatcactggaactggggcgtctggcgaacgcgcatcctcctgagttgctgcgttacgatccccagggacagcgtttggatgacgttcgctttcatcccgcctggcacctgttgatgcaggggctttgcgctaatcgggtacataacctggcctgggaggaggaggcaagggcgggaagttttgtcgcccgggcggcgcgttttgtattacatgctcaggtagaagcgggaacactctgtcctgtcacgatgacctttgccgcgacaccgttgctattgcagatgcttcccgccactttccatgactggctggcgccgctgcgcagcgatcgctacgattcgcatttgctgccgggcgggcaaaagcggggtctgctcatcggcatgggaatgacggaaaagcagggcggatcggacgtactcagtaatacgacccacgcggagcggctggcggatgattcatatcggctggtgggacataaatggtttttctctgtgccgcaaagtgatgcgcacctcgtgttggcgcaggcaaaaggaggactatcctgtttctttgtgccgcgtttcctgccagacgggcaacggaactctgttcgtcttgaacgcctgaaagataaactcggtaatcgatctaatgccagcgccgaagtcgagtttcaggatgctatcggctggcggctgggagaagagggcgaagggattcggcatatcttaaagatgggcggtatgacgcgtcttgactgcgcgctcgggagtcatggcttaatgcggcgcgcattttcagtcgccatttaccatgctcatcagcgtcaggcttttggtaagccgctgatcgatcaaccgttgatgcgacaaaccttaagtcgtatggcgctatgcctggaggggcagacggcgcttttgtttcggctggcgcgcgcctgggagcaacgtcgcgaggcgaaagaggcattatgggcgcgattattcacgccagcggcgaaattcgccatctgtaagctgggaatcccttttgtggctgaggcgatggaggttctcggcgggatggggtattgcgaagagagcgaactcccgcgcctgtaccgtgaaatgccggtgaacagtatctgggaaggttccggcaatatcatgtgtctggatgtactgcgggtgctgacaaaacaacacggcgtctatgacgtattgagtgaagcttttgcggaagtcaaaggtcaggatcgccattacgaccgcgcggtacgtcagctacagcaacgtttacgcaaaccggacgaagcaatgggcagagagattacgcagcagcttttcttgctggggtgcggagcggaaatgctgcgtcatgcctcgccgccgctggcgcaagcgtggtgtcagatgatgctggatacacgcggcgaaatgccgctgcctgcccaggtgcaaaatgatttactgttaagggcgaccgggggactgcggtaacgtttgacctgtagtacatgccatccggcgcgagccacgcggcatcaggcatagagtatcgcctgtacgcgccagttatccgactgttgttcttcatacatttgaataattctgtaccaggacgcaccctgttcatcggctttcagggcgataatccgctctacatcctgtgggtttcctgcaacattactgaccgagatcaggccgatttcattcagacccgttacgcagtcagcactggcgaattcggcagactgtgccgtcgtactcaccagtccggcagaaagcagcagtgaggataaggcaagttcttgtttcatcgtcagctccttattacataccccgcatttaacaggacgctccatcacggtaaacctgtttgtttattgtgcacaggtaaacgcataagggcgcaaagcaatgtaaaactgactaaaaatcaatctactgttattgacgatacaaaatggcttgtgaataccactggccggttacaaccgtttcatcaaccattaagataacgtaataatcggctttcgcagcgacggctttcgctctgatttcatctattgcatcatccggggagccccgaaccagcgcgcttacggtccccatccgctgtagtccttgcgtttgatcgcgacggatttcctgcgggtgatcggcgacaggcggcgcaggttgcggcgtaccctgcagcacgctacacgcgcttaataacagcgctgctatcaatgaagcaaaccgacgcataactctatctcgtttcctgataatcatagtgtaatgccttattgatttccctttagggggaatgttcccgaagtgttacctgtcacgcgattttcgaatgaaaacgttgcgaaagtgtaacccagttctcaaacattatgaattattgcgctatccataaacttgcgttaagtatttctccgtggcataccggataaaaaggagagaataatgatagcgattgaaacacgacaattagccggaggcgtcgtactacatgccttcccggaagggaaacgcgccgtgccgcttccctgtgtggtgttctatcatggcttcacctcctccagcctggtttatagttattttgccgttgccctggcacaggcaggattccgggtagtcatgccggatgcgccggagcatggcgctcgcttcggcggcgactcacagggacgaatacaccgattctggcagattctgcaccaaaacatgcaggaatttacgacgttacgtgcggcgattcaggcggaaaactggctacttgacgggcggttggcggtgggcggcgcatccatgggcggtatgacggcgctgggcattatgacgcgtcaccgagaggtaaaatgcggggccagtttaatggggtcgggctattttaccgggctcgcccggacgcttttcccgccgttatccccgcagaacccggcacagcaggcggaattcgacaatatcatcgcgccgctacgtgaatgggaagtcacacaccagttagagcgactggccgacaggccgcttctgttgtggcatggtcaggaggatgacgtggtgcctgctatcgaaaccttccggctccagcaggcactcgccgcggcgaagctggataagcatgtgacctgtttatgggccgcaggcgtgcggcatcgcattacgccagaagcgttgtcggcgacggtagcgtttttccgacagcatctttaaacgcggagtatgcttacaccctgggcttcaagctgttgcaaaacctgcggattggcatttttgccggtaatcagcatagcgatctgatcggcgcggctgaacagcatccccgcgcgctcgccaattttactgctatcgaccagcgcgaccagtttcccgacgacgctgagcattttttgttccgccatggcggttagcatatcggtcttgtacaggccatctgcggttaagccctttccgctggtaaacatccagtggccagcatagagactgttttcacttccctgcgggctcagggtaatcgactggcttttattatactgaccacccatgataatcacgctgtcatgctcttgatcgatcagataattcgccagcggcagatagttggtaatgatctgtaccggcttcccgcacatttcacgccccagcaggaaagcggtggagccgcagttaatcactacgctttcacccgggtttaccagctgcgacgccgctttcgcgatgcgtactttttcatcgtggttttgcgcctggtgcagattcatcggcgtccagcggggccgctgttgggtaatggcctctgcgccgttgcgcacttttttaagtttcccgctttcgtcgagcttgttgatgtcgcggcgcgctgtcgccggggagatccccagacgctcaatcacgttttcgacggtaacaaagcccaactgtgccagcatatccagcagtatttgatgtctttgtgcttcagtcatgagctattccgatacaaattgatttgaaaagatgatatttgaaatagcctggaaatactaaagtaaatggaaaaaatgccgggtaatcccggcatgatatcgactcacaggaaggatttgaacggtagatcgggttcaatggtaaagcaatcgtcaaacccacgcggatagtggtattcgaaattgtctttatccagcggccaggtaaacttgccgccaacctgccagataaacggtttaaaaccatacttcaggcgatctttcttcatttcccatagcacgcggatctcttgcggatcggcctggaagttcgaccagatatcgtgatggaacgggatcaccactttggtattcagcgattccgccatgcgtaaaatatccgcgctggtcattttgtccgtaataccgcgcgggttttcaccgtaagaaccgagcgcgacatcaatttgatgttcgttgccgtgtttcgcgtagtagttggaatagtgagaatcgccgctgtgatagagattgccgcccggcgttttaaacagatagttaaccgcgcgtacatccatgccgtccggcagtacgccagcggctttctgatcggcgggcagggtgattaatgcggtgcggtcaaaggcatcaagcgcatgaatttcaatatctttcactttcacgacatcgcccggttttaccacgatgcagcgttctttcggcacgccccagccaacccataaatccacgcaggtctgcgggccgataaacggaacatcatcggcgcaattctgcattacggcagccgcgacattgacgtcaatgtgatcgttatggtcgtgggtcgccaggacggcgtcaatctgacggatagcgaaaggatcgagaacaaacggcgtggtgcgcaggttaggctgtaattttttgacgccagccatacgctgcatctggtggccggttttcatcaacggattaccgtggctctgtttaccggtaccgcaccagaaatcgacgcatacgttagtgccgccttcagattttagccagatcccggtacagcccagccaccacatagcgaacgtacccggcgcgacctgctcttgttcaatctcttcgttcagccagcttccccactccggaaacgtgctcagaatccatgattcacgcgtgatgctttgtactttactcatcgcatttaccttcatgtttgttcaaaatggttcaaaacgtgatttgttttgattaatcctgacactattttctcaagaaggcaatgggctattttttgactttttggaaggagagaacgcagtcaggagaagatttaatcttgtctggcgtcatgtgaatgtttgcatctttatgattttacttattttaatgaaaaaatgagttacctataagtaaaccatgtattaagtgtgctaattatttgcgcgctacgtcacagttaatcaaatttaatcttgttgtgattacttttgaaaattaaagtgaagggactttatcctgagcgcctgtgactcagcaacctcgtctaccggagatcgttatggagatcctctacaacatctttaccattttctttaatcaggtaatgaccaatgccccgctattactgggtattgtgacctgcctgggctatatcctgctgcgcaaaagcgtcagcgtgatcatcaaagggacgatcaaaaccatcattggcttcatgctgctacaggccgggtccggcattctgaccagcacctttaaaccggtggtggcgaaaatgtctgaggtctacggcatcaacggcgcgatttccgatacctatgcttcgatgatggcaacgatcgaacggatgggtgatgcgtatagttgggtaggctacgcggtgttgctcgcgctggcgctgaatatttgttacgtcttgttgcgacgcattaccggtattcgcaccatcatgttgaccgggcacatcatgttccagcaggcggggctgattgcggtctctttctatatcttcggctattccatgtggaccaccattatctgcacggcgatactggtttccctgtactggggtattacctccaacatgatgtacaagccgactcaggaagtgacggacggctgcggtttctccattggtcaccagcagcagtttgcttcctggattgcctataaagtcgcgccgttcctgggcaaaaaagaggaaagcgttgaagacctcaaactgccgggctggctgaacattttccatgacaacatcgtctccacggcgattgtaatgaccatcttctttggtgccattctgctctcttttggtatcgataccgtacaggcgatggcgggtaaaacccactggacaatctatatcctgcaaaccggtttctcctttgcggtggcgatcttcatcatcacccaaggcgtgcgtatgtttgtcgccgagctctctgaggcctttaacggtatctcccagcgtctgattccgggcgcagtactggcgattgactgcgccgctatttatagcttcgcgcctaacgcggtggtctggggctttatgtggggcaccatcggccagctgattgcggttggcatcctggttgcctgcggctcctcgatcctgattattcctggctttatcccgatgttcttctctaacgccactatcggcgtgttcgctaaccacttcggcggctggcgtgcggcgctgaaaatttgtctggtgatggggatgattgaaatctttggttgcgtctgggcggtgaaactcaccggtatgagtgcctggatgggtatggcggactggtcgattctggcaccgccgatgatgcagggcttcttctccctcggtatcgcctttatggccgtcatcattgtaattgcactggcttatatgttcttcgctggccgcgcactgcgcgcagaagaagatgcagaaaaacaactggcagaacagtctgcttaataaggagttttgattatgaccgtacgtattctggctgtgtgtggcaacggacagggcagttccatgatcatgaaaatgaaagtggaccagtttttaacccaatcaaacattgaccacacggtaaacagctgcgcggttggcgagtacaaaagcgagttgagcggcgcggatatcatcatcgcttctacccatattgcaggcgaaatcagcgtgaccggcaacaaatatgtggttggcgtgcgcaacatgctgtcgcctgcggattttggcccgaaactgctggaagtgatcaaagaacatttcccgcaagacgtgaagtaaggatgcaacatgaaattacgtgattcactggcggagaataattctatccgcctgcaggctgaagcgaatacctggcaggaagccgtcaagatcggcgtcgatttactggtggctgcagacgtggtagagccgcgctattaccaggcgattctggatggcgttgagcagtttggcccctattttgtgattgcccccggcctggcgatgccgcatggccgcccggaagaaggggtgaagaaaaccggtttttcgctggtgaccctgaaaaagccgctggagttcaaccacgaagataacgacccggtcgatattctgatcaccatggcggcggttgatgccaacactcaccaggaagtgggcatcatgcagatcgtcaacctgtttgaagacgaagctaattttgaccgtttacgcgcctgccgtaccgcgcaggaagtcctggatctcattgaccgcaccaacgcggcagcttaagaaggaattgaaaatgtcattaccaatgttgcaggtcgcgctggacaaccagactatggatagcgcctatgaaaccactcgcctgattgccgaagaagtcgacattatcgaagtgggcaccattctgtgcgtgggcgaaggcgtgcgtgcggttcgcgacctgaaagcgctttacccgcacaaaatcgtgctggcggacgccaaaattgccgatgccggtaaaatcctctcccgtatgtgtttcgaagccaacgcggactgggtgaccgtgatttgctgtgcggatatcaacaccgcaaaaggcgcgctggatgtggcgaaagagttcaacggcgacgtgcagatcgaactgaccggttactggacctgggaacaggcgcagcagtggcgtgatgcgggtattcagcaagtggtttatcaccgcagccgtgacgcgcaggcggcaggcgtggcgtggggcgaggcggatattaccgcgattaagcggctgtccgatatgggctttaaagtgaccgtgaccggcggactggcgctggaagacctgccgctgttcaaaggcattccgatccatgtctttatcgcggggcgcagcattcgcgatgccgaatcgccggtagaagccgcacggcagttcaaacgctccattgcccaactgtggggctaaggagcggctatgctgtcgaaacaaattccgctcggcatctatgaaaaagcgctccctgccggggagtgctggctggagcgcctgcggctggcgaaaacgctgggttttgacttcgttgaaatgtcggtggacgagaccgacgcccgactggcgcggctcgactggagtcgcgagcagcgcctggcgctggtgagcgcggttgctgaaaccggcgtgcgtgtgccgtccatgtgtctgagcgcgcatcgtcgttttccgctcggtagcgaagatgacgcgatacgggcgcaggggctggagattatgcgtaaagcgattcagtttgcgcaggacgtcgggattcgcgtcattcaactggcggggtacgacgtttactatcagcaggccaacgacgaaacgcgttgccgcttccgcgatgggttaaaagagagcgttgatatggccagccgcgcccaggtgacactggcgatggagatcatggactacccgctgatgaattccatcagtaaagcgctgggctatgctcactacctcaataacccgtggttccagctctatccagatatcggcaatctgtctgcctgggataacgacgtacagatggagctacaggcgggaatcgggcatatcgtcgcggtacacgtcaaagatactaaacccggcgtgttcaaaaatgtgccgtttggcgaaggcgttgtcgatttcgaacgctgcttcgaaacgctcaaacagagtggctattgcgggccctatctgattgagatgtggagcgaaacagcagagaacccggcggcagaggtagcgaaagcgcgtgactgggtgaaagcgcgcatggccagcgccggtctggtggaggcagcctaatgcaaaagctcaagcagcaggtatttgacgctaacatggatttgccccgttatgggctggtgacctttacctggggcaacgtcagcgctatcgatcgcgaacgcgggctggtggtgattaagccaagcggtgtcgcctatgaaaccatgaaggtagatgacatggtggtggtggatatggatggcaaagtggtggagggacgttatcgtccttcttccgataccgctacccatctggcgctgtatcaacgctatccgtcgcttggcggcgtcgttcatacccactccacccacgccacggcatgggcgcaggcggggatggctattccagcgctcggcaccacgcacgcggactatttctttggcgatattccttgtaccagagcgttaagcgaagaagaagtgcagggcgagtacgagctgaacaccggcaaggtgatcatcgaaacgctgggcgaggtggaaccgctgcatacgccaggtattgtcgtgtatcaacacgggccgttcgcctgggggaaagatgcgcacgatgcggtacataacgcggtcgtcatggaggaagtggcgcgaatggcgtggattgcgcgcggtattaacccggcgctgaatcccatcgacgattatctgatgaataaacacttcatgcgtaagcatggcccgaatgcgtattacgggcagaagtgaagtatgagctccggaatgtgaatattatcgggatgtcacaggtctaattccggagccatctttccgcgaaaaaagccccctgctcagggggcaaatcaactatggctttttcgttggttttcctgatgctagcgataaatattcgcgctggcgtgtatattgccgttgctacccggttcccggataagtatgacgtgataatacattgcgtttcgcacgtcggcctcttcattcagcgccagattggcttcactttccgtggcgaagttatggttgatgtagattacgcctaagctgcgcacatcatccatatttctggcctgatgattatttaactcgacggctgccgttgccgttatgccaggcaaaagcgcagccagaaataacattatccgggctcgcatagagtacctcctcagcagcgcggtctggttggcgatatccccctttagtgaatcgcttctggtttaattttaaccataacccgccgcagagatggcgaccttttctgatgctgttgttcaaaaaattatcgcattgtcgctttttacctgattaacaacccattgatgtatgccgccatgtttaagaaatcctgtgtggcaaaaaagtgcgctgaccacagtgtcaatttctctgccgcaacaggccgtttatagtggcatgcgatatgaagttaatatctcagcagcaaaatgtgacgggacaggcgttacgttcggcacgataaataattgtacaatcaccttgagtttgcccgcaggcgccagtattataacgcgtcatttttcagccgacctttaacacgttccttgcctccatgggccgcggctgacccagacaggaggctgaataatccgtaaggagcaattcgatgcgtcattacgaaatcgtttttatggtccatcctgaccagagcgaacaggttccgggtatgatcgagcgttactctgccgccatcactggcgcagaaggcaagatccaccgtctggaagactggggccgccgtcagctggcttacccgatcaacaaactgcacaaagcgcactacgttctgatgaacgttgaagcgccgcaggaagtgatcgatgagctggaaactaccttccgcttcaacgatgccgttatccgcagcatggttatgcgtactaagcacgctgttaccgaagcttctccgatggttaaagcgaaagacgagcgccgtgagcgtcgcgatgatttcgctaacgaaaccgcagatgatgctgaagctggggattctgaagagtaatttctgatgaccaaccgtctggcgttgtccggcaccgtgtgcagggccccccttcgaaaggtcagtccatcaggaattccgcattgccagttcgtgcttgagcatcgttctgtgcaagaggaagccggctttcaccggcaggcgtggtgccaaatgcccgttattgttagcggacacgaaaaccaggccattactcacagtataacggtcggcagccgcataaccgttcaggggtttatttcttgccacaaggcaaagaacggtctgagcaaaatggttctgcatgccgagcagattgaattgatagattctggagactagccatatggcacgttatttccgtcgtcgcaagttctgccgtttcaccgcggaaggcgttcaagagatcgactataaagatatcgctacgctgaaaaactacatcaccgaaagcggtaagattgtcccaagccgtatcaccggtacccgtgcaaaataccagcgtcagctggctcgcgctatcaaacgcgctcgctacctgtctctgctgccgtacactgatcgccatcagtaatcggtcacggtccattaatacgactttgagaggataaggtaatgcaagttattctgcttgataaagtagcaaacctgggtagcctgggtgatcaggttaacgttaaagcgggctatgctcgtaacttcctggtaccaaagggtaaagctgttccggctaccaagaaaaacgttgaatacttcgaagcacgtcgcgctgaactggaagctaaactggctgacgttctggctgctgcaaatgcacgcgcagagaaaatcaacgccctggaaaccgttactatcgcgtctaaagcaggcgacgaaggtaaactgttcggttccatcggtactcgcgacatcgctgacgctgtgactgcggctggcgttgacgtggctaagagcgaagttcgtctgccgaacggcgttctgcgtaccactggcgaacacgaagtgaacttccaggttcacagcgaagtattcgcaaaagttatcatcaacgtggttgctgagtaatcaggcattctcgtttttgctagcaacgaaacgtcggcccagcgccgacgttttgcttttttaaccccatcgcttttcgactggctatctccccctcttttcgcgataatcaaaaataaaacattattttaatttcttggtgaaagaatggatacccaacgccaggcctccccgtttgcccgcaaaaacgtcgtttatgtgtgtgccgcattttgttgcttgctatggggcagcgcttatccagccatcaaaagcggttatgacctctttcagatagccaccgatgatatcccttctaaaattgtttttgctggttatcgttttttgtttgcgggtgggttgctactactgttcgcgctgcttcagcgtaaaccgattggtcggtttcgtccgcgccagtttgctcagttgacgttactggggctgactcagacgtcgctgcaatatctctttttctatatcggccttgcgttcacctccggcgtgaaaggctcaatcatgaacgcgacaggcacattcttcagcgtattgctggcgcactttatttatcagaacgaccgattgagctacaacaaaacgctcggctgtattctgggctttgcgggcgtcatggtggtgaacgtcagcaacggcctggatttcagctttaatctgccgggagaaggctccgtggtgctggcggcgtttattctttctgcggccacgttgtatggcaaacgtctctcgcagacggtcgatccgatggtcatgactggctatcaattggggattggcggtctggtactggtcattggcggttacgtttttggcggtacgctgacgatacatggcttctcgtcggtggcgattttagtctacctgacgctgctctcgtcggtcgcttttgcgctatggagcattttactcaaatataatcgcgtggggatgattgcgccgtttaactttctgatcccggtttctggcgcggctctttcggctatttttctcggcgagaatatattggagtggaaatacatgattgcgctggtgctggtgtgttcggggatttggtgggtgaataaggtgaagcggtaatgcttcacctgaacgaatagggtatagacggggtaaggcgcagccggcgttactgtgcgcgaataaaactgccgtcaggctgacgcgtaaacagcacctgttgaccgttatcgccatctatcgttaaacctgtcaccaccccgctggcattctggcgaattttaatcatttgaccatttttgagattactcagcggcttgccagcgccttctacctgcgccattgcataaacgtctgtcgggggcagcccgtggtcacggaacagttgcgccagagttttaccagactctacccggtacgagcgccactgttgaccgatgccgctatcctgctggaaaggctgcgtctgcggctggttttgttcttccggctggccttcctggataggttccggcgcaacgggcgccacctgatccggatcgttttgcggcgcgaccagctgcgcctgaagctgggcctccgtcggcggctgtgattgcgattgcagatccaattgcgcttcccgcgtgacgacaggtgagtcgctggtctcgctggcgggcagcaggaaaccgatcaccagcacgatagcggcaatgataatgccacgacgatgcataggcggcagcggttccatgatgcgaaaattatccggcgcgtgccagattttcgccagggttggttttaattcaaagcgcccgggcatggtttacctcctgctccgcatctcgttccttaatcatagagtatagatggctaacgctatgatactggtagtgctatccgctttcgtgacatcaatacggataatctattgtttctttttccctgcgatttgtcatcctccctgagacaaagttttaccagaagaagcgtggctgttatgctgcccgctacttttttgatatccgatgaaggaaaaataatggccaccccgacttttgacactattgaagcgcaagcgagctacggcattggtttgcaggtagggcagcagctcagcgaatccggtcttgaagggctgttgcctgaagcgctggttgcaggcattgctgatgcgctggaaggtaaacacccggcggttcctgttgatgtggtgcatcgtgcgctgcgtgaaattcatgagcgtgcggacgcggtgcgtcgtgagcgtttcaaagcgatggcggccgaaggcgtgaaatacctggaagaaaaccgcgaaaaagacggtgtgaacagtactgagtctggtttacagttccgcgttctgacgcagggcgaaggcgcgattccggcgcgtaccgaccgcgtacgcgtgcattacaccggtaagcttattgatggcaccgtatttgacagctccgtcgcgcgcggcgaaccggctgaattcccggtaaatggcgtgatcgccggctggattgaagcgctgactctgatgccggtaggttccaaatgggaactgactatcccacaggagctggcctatggcgagcgtggggccggggcatctattccgccattcagcaccctggtgtttgaagtggaactgctggaaattctgtaagcgccccgggtttgccggatgatggcgtaaacgccttatccggcaaccctggcttcagcagatgccaatattttattttgcaaatggcgtcgttacgtgtatttttgtgagctaattcgcattatcaaagtgatataacactcattttaaacataaaattaacattgtatttgaatcttagtattcatcccgccgattcttacctaatatcgatgagtcctgataacaggatcgtcgtatcatagaccaaaggccgtagagcccgcacaacacagacaggtacaggaagaaaaacatggtagatcaggtaaaagtcgcagccgacgaacaggctccggctgaacagtcgctacggcgcaatcttacaaaccgtcatatacagcttatcgctattggcggcgctattggtaccggtctgtttatgggatcgggtaaaacgatcagtctcgccggaccgtcgatcatttttgtgtatatgatcatcggttttatgctttttttcgtgatgcgcgccatgggggaattgctgctctcgaatctggaatataaatcgtttagcgattttgcttccgacctgcttggcccctgggcgggatatttcaccggctggacgtactggttttgctgggtagtgaccggtatggctgacgtggtggcgattaccgcctacgcgcagttctggtttcccggcctttccgattgggtcgcctcgctggcggtagtgatcctgctgctaagcctcaacctcgccaccgttaaaatgtttggtgaaatggaattttggtttgctatggtcaaaatcgtcgccattgtggcgttgattgtggtcgggctggtgatgattgcgatgcactttaaatcgccgacaggcgttgaagcgtctttcgcgcatctgtggaatgacggcggctggttcccgaaaggtattagcgggttctttgccggtttccagattgcagtgttcgctttcgtgggcattgagctggttggtactaccgccgcagaaactaaagatccggaaaaatcgctgccgcgcgcgattaactcaataccgatccgtatcatcatgttctacgtctttgcgctgattgtcattatgtcggtgacgccgtggagttccgtggtgccggataagagcccgtttgttgagctgtttgtactggtgggtctgcctgccgctgcgagcgtgatcaactttgtcgtgctgacctcggcggcgtcttccgccaacagcggcgtcttctcgaccagccgtatgctgtttggcctggcgcaagaaggcgtggcgccaaaagcgttcgctaagctatcgaaacgcgcggtaccggcgaaaggcctgaccttctcctgtatctgcctgctgggcggcgtggttatgctgatggtcaacccgagcgtgattggcgcattcaccatgatcactacggtttcggccatcctgtttatgtttgtctggaccatcattctgtgttcatacctggtgtaccgcaaaaagcgtccccacctgcatgaaaaatccatctataagatgccgctcggtaagctgatgtgctgggtctgcatggcgttctttgcattcgtgctggtattactgacgctggaagacgatacgcgccaggcgctaatcgtgacgccgctgtggtttatcgcgttgggtctgggctggctgttgataggtaagaaacggatggcgggaatgcgttaattgttttgcccggtggcgctggcgcttaccgggcttacagcgtaacgttgatttggaggccggataaggcgccgtttacagccgccatccggcaaaatgcccggctggcgattattccccggccagcgcgcgtgggaacagcacgttattctccaggctgatgtgctccatcagatcatcaatcatctcattaatgccgttatacatcgctttccaggtggtgcaggcttctggcggcggcgttacatttttggtgacgtgtttgatgacgtctaccagctctcccgcctcgtcatgctcgctttccattacgcttatcgggcccgttgcctggcgacccataccctgtttgatcatggggaacaggatctgttcttctttcatcatatggctggaaagctcttcatgcagcgcggtgagatattttgtcaggccgcgtgggacgtttggcttatccgcgtggacgcgttccactttggttgcctgcagaataagctccggcagttgttcgcgatgtcggtcatgatagcgaacaacgatatggtcaataatgtccgccagcggaacggcgcgccagtctttttcgatgggctgttcagccaactgcgccagttgcgcttctatgatgtcaatatcgacgtcgtgacgcgcggcggcgcgcgccagcgtctgttttccgccgcagcagtaatccatatcgtactggcgaaacagcgccgatgcgcggggaatagagagcgccagttcgcctaaaggttgatcgcgataagccatagccgttacctcatttgcaataatataagttgtattttaaatgcatctttaaggcgaagctataactctttcggggtgcgtataatttaagcgagtatgaaattagcgttccgtgaccggaacgacggtcgctttttccggtttcgctctcacggcaatgaccacgcccgccaccaggagcgcaatgccgcttaacgtcaggaatggcgggatttcctggcgcagaatgaaggtatagagcagtcccgccaacgtctcaaaaacaatcagcggccctaaaataacggttggcaatttttggctggcgatattccagcacagcgcgcccacccaggaacacagcaccgcgatggcgatcatcagaccgataaacagcgcgggatgcgggccaaagggcagggtaaacagcggtttctggatactcagccacagacagaccgccgcatagccgattaacgagaccggcagcgtaaccagcgcctgcgccgttgcccacatcatgggatgtttgtcgggattttcccgcagccagcgggcgttgcgcagcgcataccatgcccagcacgctacggaaatcagcgccagcacaatgcctgaaccatagcgccagccgctaacatcggacaatccctggctaagttcagcaatattgacgcacagcaggccaaaaccgataagcgccagcgcgggcgctaaacgccgccaggataatctgccgtctcgttggctatagagaacgttagcgaaaagcggaatgacgaccggcaatgtcccgatgatcatcgtcgacaccggcgcgccggttcgctgaatggcgctggcgaggcaggcgtaatagattacattgcccatcagggtcagcgacagggcggtggaccagtctttgcgcgttaactggcgtaaccgcgtgcggcctaaccaggcaatcggcagggcaatcagccccagcgccagatagcgtcccattgactgtaagagggccgggtaatccggcacgattaacgggccgacgaaaatcaatccccacattagccctgccagcagggcgtatagcacgccgctaatcatcagattctcctcataaaccgttccgtcattatcagagaaggtctatgaggatgccacataaattaactaaattttaacatttacagtacggagcgaaggctttctgtgagcgtcgtcgtcgggcgaccgatgagtttacgcagcgtatggctgtcatcaaacaggccgcctttcgccgcgccagcgtcagaattggccaacatatccgccagtccgtcaggcaggcctgcgcctttcagcgcggcggcaaaatcgacttcgctcaggttctggtagacgattttttttccgctttgatgagtaagttcatccgccaactggcttaatgtccaggcgtcatcacccgccagttcgtagacattcccggcgtgaccctcttcacggatgacgcgcgcggcggcggcggcatagtcagcgcgcattgcggaggcgattttcccttctcccgccgcgccaataaagacgccatgcttcagcgcggcagggacgctcgccaggtagttttccgtataccagccgttacgtaatagcgtgtgaggaatacctgactcagccagcatcttttccgtttcaatatgttcatcggcgagcgccagcggcgatttatccgcatgtagcaggctggtataggcgatgaatttcaccttcgcggcaatggcggcctgaataacgttgcggtgctgcgcggtgcgttgtcccacttcgctggatgatataagcagcagtttatcaacgccctgtaaggcggtggtcagcgcggcttcgttagcgtaatccgcctggcgaacggcaatcccgcgctgactgagcggggcggcttttttcgggttacggacgatcgcgacgaggtggctggcgggcgtcgtttttagcaggttttcaataacgtgttggcccagttggcccgttgcgccagtgatagcaatcatggtgaactcctcagtgttggtcttgtgttttattacgctaccacctaaacttacttttagtaagtacgtacaaaaaggtaagtatcaatgcgcgctcatactctttcccggcagttgcgtgaaggcaatctctttgctgaacagtgcccgtcccgtgaggtgttaaaacatgtcaccagtcgctggggcgtactgattctggtggcgttacgcgacggtacacaccgttttagcgacctgcgccgcaagatgggaggcgtgagtgaaaagatgctggcgcagtcgttacaggcgcttgaacaggacggatttcttaaccgggtgtcatatccagttgttccgccgcatgtggagtacagcctgacgccgcttggcgagcaggtgagtgataaagtcgccgcgctggcggactggatagaactgaatttgccgcaggtattggcgcagcgggaacgtttatcagatggcggctagcgctttattcggcctgccagtcaggccgaataaacgcagcgccatacgggacacacgttacttgcttaaatccacctgataaatggcaaaaccgatatcatcgacggcaaccttcttcatcggatactgccctttcgctttaatgaaggcagcggctttatcgcctggcgatgtttcaaagcggatatccagcgccgtatcgctgtggattggcgccagacgccagttattatccgccgccggatggatttcgcccgcgcgttttgactctgcgccaatccatgccgccagcacggcgcgattttcatccggagacgcaaaggcgatatggctgtcgcccgtgccggcaaacttgccgccgtaagcgcgatagttattcgtggcgaccaggaacgtagcgttcgggtcgacaggcttaccgttaaaggtcaggtttttaatacgttccgcctgcggattcaccatctggcattcgccatcatagcgggcgggctgtgacacatcgatttgataattcacgccgtcaatgacatcgaaattataggtgcgaaagccatcccaattgatcaacgattgcggtttgttgctgtgaatatcaatctgattaaattgtccggcagaacattccagccactcttttacctccttgccgctggctttcaccaccaccagcgtattcggatagagataaagatcggcggcgttacggaaggtcaactggcctttttccacctcgacaaagctggcaggatcgttcttacgcccgccaactttaaacggcgcggcggcggacagcaccggcagtttcgccagatccggatcgccctgaataaagtgttccacatacgctttttgcgcgttattcaccacctgtacggtaggatcgtcctgcaccagagcaagataactgtacatattatcggcggatttaccgatgggcttgctgacaaactcgcgggtggcatcgtgatcggctttcagaataccgaccagcttactgtcttccgccgccagcgactttttagcggcggcgtcatagataggccgcgcttccgctttcgcctgcgtaacctgccatttgccgctgtcgttattgagcaccagatcgaccactcccagatggtcgccccacatgccaggcattaccgcaggaatgccgttaagcgtacctttggcgatatccgcgcctttgatgtcggcaaaatctttaccggggaagacggcgtgagcgtggccaaacataatcgcgtcgacgccaggaacttcgctgaggtaataaaccgagttttccgccatgctgtggtacggatcggcagaaagacctgaatgagcaatgactaccacgatatcagcgcctttctcgcgcatttcgggcacatatttccgggcggtttccgtaatgtcattgacggtaactttgccgctcaggttcgctttatcccaaatcatgatttgcggcggaacaaagccgatatagccgattttcagagtttgcgggttgccgtctttatcaataacgctcgtctctttaatcagataaggcgtaaagagcggcttttgggttttaacgtcgataatattggcgttaacataagggaatttcgcgccagccagcgcgttatgcagatagtccagaccataattaaactcatggttgccgaggtttccaaccgcgtaatccagagtgttgagcgctttatagaccgggtgaacgtcaccgtctttgagcccttttgccgccatataatcgcccagagggctcccctgaatcaggtcgccgttatccaccagcacgctgtttttgacttcatttcgggcggcatgaatcaaacttgcggtacgtaccaatccgaatttttcggttgcggtatccttgtaataatcgaaatccatcatgttgctatgtaaatcagtagtttccatgatacggagatcgacggtggccgcattcacgctggcggcgatcagcgtagccagaagcgttgcactaaacttaatcatcagaggcaccttttaagaacgcaatagaaaagccggatagtgaaaaatagcgatgacaaacagtgaaacccgatatcgttccaaccgtcgccagaagaaggcgaaaccgccccatccggccgattttttgcgagtgttcacagaaaggtgaatcatgccatgaaagctattatcaaaaccgctgacggtatcacagttggcggaacccttaacgatcgggtataagtaaaacaacgagttaacgcccccgtcataaagaggtggagaatgttagaacaagtatgccagcttgcacggaacgcgggcgatgccattatgcaggtttatgatggagccaaaccgatggagtacgcccgcaagcaggacgattctccagtcactgcggcggatatcgccgcacataccgtgattctcgaagggttacgcacgctcacgccggatattccggtgctttcagaagaggatccgcccgcctgggaagtgcgccagcactggcagcgttactggctggtcgatccgctcgacggcaccaaggagttcatcaagcgcaatggcgaattcacggtcaatatcgcgctgattgagcagggcaagccggtgttgggcgtggtctatgcgccggtgctgaaagtgatgtactacgcggcggaaggtaaggcctggaaagaggagtgcggggtgcgtaagcagattcaggtccgggatgcccgcccgccgctggtggtgattagccgttcgcatacggatgatgaactcaccgaatatctccaacagcttggcgaacatcagacaacctctattggttcctcgctgaaattctgccttgtggcggaaggccaggcgcagctttaccccagatttgggccgaccagcgtctgggacactgccgcaggtcatgccattgccgttgcagccggggcgcacgttcacgactggcagggaaaaacgctggactatacccctcgtgaatcgttccttaaccccggcttccgggtgactatttactgaggagcttatgcagcaggtcgaccacctgctgtacctcttgctgggttaacgcgccatctttcacccattgaacccgaccgtctttgtcaagcacgatgacggcggacccctcttcttttaattgccaggcgttacgcgccacgccattgctgtcgacaataaattgcgaccacgggtagagctttttattactttctatactgctacgcacgaacataccggagcctgggatcgcatcatcggtgttcacaattgtggtcgtctggtatctgtcatgcgggagcttggctgatttaatcgcttcaatcagcgtggcgtttttttccttcgctgacgttcgacccgcaatgtgcagcaggacgcgcacttttcccgccagctgcgcgctattccagtttttataactaaactcatctttattcaacgtcagttcgccacggtcggcaatgcctaccggcggcacccgttggttaacttcaaggttatgcgcacaagccattatggggagtagcagacacgacatcgccagaattttacgtaaggtcatggtcattccttctttatttttttgcaggtgatccgaccactttgggccgatagttaatcatatgtgcgattgatgctttttcccgcaaaggggatgccagtttgcgggcgggcgcacacttcctgtgaaaaatgaaggcatatactgagaaaaatgagctgatgtttagataattctgaataactgtaatcaaaaggtaaatatacttatgcacactggaaacgacgtagatatggtctatagtcatatggcattaaaatttgcgccttaaaactgttgggccgattgtggcatcgcaagggcgtaatactctgcaggagacaacaatgaaaattttccaacgctacaacccgctacaggtggcgaagtacgtgaagatcctgttccgtggacggttatatatcaaggatgttggcgcttttgagttcgataagggtaagattcttatcccaaaagtgagagacaagcagcacttgtctgtgatgtctgaagttaaccgtcaggttatgcgtctgcaaactgagatggcgtaaccaaaagtgctatgcagtaggttaaaaaagtaaaaaaaaacggctcctgaatcaggagccgttgatgtttctggcaaacggatttcaggccgcgctgtcttctttaccttgcgcatcgggcagtttcggcgccggtacgttgcttttattgtcgagacgcgtcaccagcaactgatcgatacggtagttgtcgatatccaccacttcaaatttgtagccggaaaacttcaccgaatcagtacgttttgggatcttgcgcagcataaacatcataaagccgccaatggtttcatagttgccggattgcggaaactcatcgatatccagcacgcgcatgacgtcgtcaatcggcgtgccgccgtcaaccagccaggaattttcatcgcgcgccacaatttgctcttccagtccctggccgaccaggtcacccattagcgtggtcatcacatcgttcagcgtaatgataccgacgaccagagcgtattcattcataatgaccgcgaaatcttcgcccgccgttttgaaactttccagcgcctcagaaagggtcagcgtatccggcacaatcaaggtattgcgaatttgcacgccgctattcagcgccatactttggttagccagcacgcgattcagcagatctttggagtctacatagccgatgatgtggtcgatatcttcattacacaccaaaaattttgagtgcggatgttcggcgacctttttcttcaggctttgttcgtcttcgtgcagatcaaaccagatgatactttcgcgcgacgtcatagaagacggtacggtgcgagattcaagttcaaacacattttcaattagttcgtgctcttgcttgcgcaagacgcccgccagcgcgccggcttccaccactgcgtaaatatcatcagaagtaatgtcgtctttccgcaccattggaattttgaacaggcggaagatgttgtttgccatgccgttaaacagccacaccagcgggcgaaaaacgaacaggcagaagcgcatcgggttgatgatacgcaaagccacagcttctggcgcaatcataccgatgcgtttcggggttaaatccgcgaacaggataaacagccccgtcaccagcgagaaagagagaataaagctcagctgctcggagagttctggcgacatatagtgcgagaagagggcggaaaaggcgggcgaaaatgccgcatcgccgacgataccgccaagaatagcgacggcgttcaggccaatttgcacaacggtgaaaaacatgccgggattttcctgcattttcaatacgcgttgtgcgttgatactgccttcatcagctaataacttaagtttaatcttacgtgatgcggcaagcgagatctcggagatggagaagaacgcacttacagcgatcaggcagaatataatgaatatactgtttaacatatcttatccggcgaaacgccagatcctcggaagggaagtttataaatccgtgtggtaacgtttaatgaaaaccggctcgtagcagtgagccgataagttcagggctagtatagcgtaagctactgtaaagtcgccagagggttcattttcaactccgacaagttccccctacgccagcgtcgtcacgcgtcaggcggcaggcaaacgccgatcccgccaatcccgcagtaaccatatggatttttgtgcagatactgttggtgttcatcttcggcgtagtaaaacggcgtcgcatgggcgatttccgtggtaatagggcgatggtctccggcggcggtcattgccgactgaaagcgctcgcgactggcgtgagcggcggcattctgttccggcgttaagggataaatcgcagaacggtattgcgtaccgtgatcgttaccttgttgcatcccctgcgtcggatcgtgattttcccagaaggtctgtaaaagctgctcataactgataacggcaggatcgtacactatccgtaccgcttcggcatgaccggtctgcccggagcagacttcccggtaggttggattaggcgtgtaaccgcctgcataccctgccgcggtgctatatacgccgggcaattgccagaataaacgttctacgccccagaaacagcccatagcgaagtaggcgatctccatcccggcagggacattggtcatagagtgttcatttaccgcatgcagagtggcgatcggcatcggggtgttgcgtcctggtaacgcatctgcttgagtaaccagatgttttttatcaaataaactcatgagctattctcccgaaagcgttaattggcgttaaggttgtaacgagacgcatctttgcacacaataacaacattaatgtatctggatttaaccataagaaatatttgggcagtcgtctgcttttcaatcgaaattgttgattttatgttaagccgcggagcggtagtgtgattttttccaggggtgggaataggggatattcaggagaaaatgtgccacatatccgtcagttatgttgggttagcttactgtgcctgagcagttctgcggtagccgcaaatgttcgtctgaaagtcgaagggctatccggagagctggaaaaaaacgttcgcgcacagctctctacgattcagagcgatgaggtgacgccggatcggcgctttcgcgcccgagttgatgatgcgattcgcgaagggcttaaagcgttaggctattacgaacccactatcaaattcgacttgcttccaccgcctgcgaaaggacggcaggtattaatcgccagggttacgcccggccagccggtgttgattggcggtacagaagtcattttacgcggcggcgcgcgcacggacaaagattatctggccttactgaaaacgcgtccggcaatcggcacggtgctgaaccagggagactatgacaattttaaaaagtcgttaaccagcgtgtcgctacgtaaaggctatttcgacagcgaattcattaaaagtcagttgggaattgctctgggccgccatcaggcgttttgggatattgattatgatagcggtgagcgctatcgcttcggacctgtcaccttcgaaggttcgcagattcgtgatgaatatttacaaaatctgttgccgtttaaagagggtgatgagtacgaatcgaaagatttggcggaactaaaccgccgactttccgctaccggatggtttaattctgtcgtggtggcgccggaatttgagaaatcgcgtaaaacaaaaattctgccgttaaaaggcgtggtatcgccgcgaaccgaaaacacgattgaaaccggggtggggtactccaccgacgtcgggccgcgcgtgaaagcgtcgtggaaaaaaccgtggatgaactcttacggtcatagcctgaccaccagcaccagtatttctgcgccggaacaggtgctggattttagttataaaatgccgctgctgaaaaacccgctggagcaatactatctggtacagggcggttttaaacgtaccgatttgaatgatacggagcaggactcgaccacgcttgccgtgtcgcgttactgggacctttccagtggttggcagcgggcgattaatctgcgctggagtttcgaccactttacccaggggaacgtcaccaataccaccatgctgttctacccgggcgtgatgatcagccgaacccgctcgcgagggggactgatgccaacctggggcgattcgcagcgctattcagtagactattcgaatacggcctggggctccgacgtggatttctccgtgctgcaggcgcaaaacgtctggattcggactttgtacgatcgccaccgttttgtgatgcgcgccaatttgggctggatagaaaccggtgatttcgacaaagttccgccggatttacgtttcttcgccgggggcgaccgcagtattcgcggctataaatacaaatctatttcgcctaaagatagcgacggcaatcttaaaggcgcctcaaaactggcaaccggatcgctggagtaccagtataacgtcaccggtaaatggtggggggcagtgtttgtcgatagcggcgaggcggtgagtgatattcgccgtagcgatttcaaaaccgggaccggggtcggcgtgcgctgggcgtcgccggttgggcctgtcaaactcgattttgccgtaccggtcggcgacaaagacgaacacggtttacagttttatatcggtctggggcctgaattatgagtttatggaagaaaataagcctcggcgtgttgattttcattgtggtgttactggcgagcgttgcgtttctggtcgggacgacgacggggctgcatctggtattcagtgcggcgaaccgctgggtgccggggctggagattgggcaggtcaccggcggctggcgggacttatcgttaaaaaatatccgctatgagcagccgggcgttgcggtgaatgcgggcgaaattcatctggccatcgggcttgattgcctgtggcgcagtagcctgtgcgtcaatgatctggcgctaaaagatattaatgtcgctatcgacagcaaaaaaatgccgccctccgaaccggcgcaagaagaggaagaaagcgggccgctgaacctctccacgccctggcccatcacgctgtcgcgcgtggcgttgaataacatcaatatcaagattgatgacactaccgtttcggtgttggattttacctccgggctggcatggcaggagaaaaacctgaccctgaaaccgacgcggcttcagggactgctgatcgcgctgccgaaggtcgctgacgtggcgcaggaagaggtggttgaacccaaaatcgagaaacctcaaccggatgaaaagccgcttggcgaaacgctaaaagatctgtttgcaaaaccggtaatgccggagatgaccgatgttcacctgccgctcaatctgaatatcgagtcatttcgcggcgagcagctacgcatcaccggcgataccgatctgacggtgcgcacgatgctgcttaaagtcagcagtatcgacggtaatatgaagctggatactctggatatcgacgccaaccagggcacggtgaaagcctccggtacggcgcagctcgccaataactggccggttgatattacgctcaacagtacgctgaatatcgatccgctaaagggtgaaaagataaaactcaaggtcggcggcgcgttacgcgaacaactggaggtcggggtgaacctttccgggccgatggatgtcgcgcttcgcgcccagacgcggctggcggaggccggtttaccgctcaatcttgaagtcgtcagccaacgcattgcctggccattgacgggtgatacccagtttcaggctgacgatctgaagctcaaactgagcggtaagatgaccgactatacgttgtcgatgcgaaccgccgtgaaaggacaagatattccgccggcgaccatcacgctggatgccaaagggaatgagcggcagattaatctcgataaactcaccgtcgccgctctggagggaaaaaccgaactgaaagcgctggtggactggcagcaggcgattagctggcgtggcgaactgacgctgaatggcatcaataccgctaaagagattccggactggcccgcgaagcttaacggcgtcatgaaaaccaaaggcagcctctacggcggcacctggcagatggatgtcccggagctcaagctgaccggcaatgtgaagcagaacagcgttaacgttaacgggacgctaaagggcaacagctacatgcagtggacgatcccggggctgcactttgcgctgggcccaaacagcgccgatataaaaggcgagcttggcgttaaggagctgaatcttgacgccgccatcgatgcgccagggctggataatgcgctgccaggactgggcggcatggcaaaaggaatcgttaaagtccgcggtacggtagaagcgccgcagctgttggcggatatcaccgcccgcggcttgcgctggcaggagctgtctgtcgcccaggcgcgcattgagggcgatattaaatccaccgatcagatagcgggccatctcaacgttcgcgtagagcggatttcgcagcccgacgttaatatcaatctggtgacgcttgacgccaaaggcagcgagaagcagcatcagctacagctccgtgttcagggagaaccggtatccggtcaactctccctgacaggcagcttcgatcgcgaggcggcgcgctggaaagggacgttaagcgacacccgtttccagacgccagtggggccatggtcgttgacccgcgcgattgcgctggactaccgtaataaagaacagaaaatcagtatcgggccgcattgttggctgaacccgaacgccgagctgtgcatcccgcaaaccattgatgcgggcgccgcaggacgggcggtggtcaatctcaaccgctttgatctggcgatgctgaagccatttatgcctgataccactcaggccagtgggatctttagcgggaaagcggatgtgtcgtgggacaccacccaggagggattgccgcaggggaaggtcacgctttccggtcgtaatgtgaaggtcacgcagaccgtcaatgacgcgccgttaccggtcgcgtttgagacgctgaacctcagcgccgatctgcacaataatcgcgccgagctgggatggctgattcgcctgacgaacaatggtcaattcgatggccaggtgcaggtaaccgatcctcaggggcggcgcaatctcggcggtaacgtcaacatgcgcaatctcaatctggcgatggtcaaccctgtcttttcgcgcggcgaaaaagcggcgggaatgttaaacgccaggctacgtctgggcggcgatgtgcaaagcccgcagttgtttggtcagttgcagcttagcgcgctggatattgacggtaactttatgccgtttgagatgcagccgagccagctcaccatgaactttagcggtacgcgttcgacgctcgccggtatcgtgcgaacacaacaagggcaaattaacctgaacggcaacgccgactggagtcagattgacaactggcgcgcgcgggtgacggcgaaaggcagccgggtgcggattaccgttccgccgatggtgcgcctggatgtctcgccggatgtggtctttgacgcgacgccttcgctgttcacgttggatgggcgtgtggacgttccgtgggcgcgaattgtggtgcacgacctgccggagagcgcggtcggcgtctccagcgatgtggttatgctcaacaatgacctgcaaccagaaacgccgcagacagcgtctattcccatcaacagtaatctgacggtccacgtcggcaacaacgtgcgcatcgacgccttcgggcttaaagcgcgtttgaccggcgatttgaaagtcgcgcaggataagcaggggctggggctaaatggtcaaatcaatattcctgacggccgattccgcgcctacggccaggacctgcttgtccgtaaaggcgagctgctgttctccggcccgccggatcagccgctgctcaatatcgaagcgatccgtaaccctgacgccaccgaagacgatgttattgcgggcgtgcgcgtcacaggcacagctgatgaacccaaagcggaaatcttctccgatccggcgatgccgcaggctgaagcgctttcttatctgctgcgtgggcaggggttggacagcaatcagagtgatagcgcagcgatgacctccatgcttattggcctgggggttgcgcaaagtggtcaggttgtgggtaaaatcggagagacattcggtgtaagtaatctggcgctggacacgcaaggggtgggcgattcgtcccaggttgtggtcagcggctatgtactgccgggtctacaggtgaagtatggtgtagggatatttgactctctggcgacgctcacgttacgttatcgcctgatgcctaagctatatctggaagcagtgtctggcgtagatcaggcacttgatttgctctatcagtttgagttttagcaatgcgaatatttgtctatggcagtttacgacagaaacaaggcaacagtcactggatgaccaatgcccaattgcttggcgattaccgtatcgataactaccagttgtatagtctgggccactatccaggcgcagttccgggaaacggagcggtatacggtgaagtttatcgaattgataacgccacgctggccgaacttgatgctttgcgcaccaggggcggtgaatacgcacgccagttaatccagacgccttacggcagcgcatggatgtatgtatatcaacgtcctgttgatgggttaactctgattgaaagcggtgactggttagacagaaaccagccctgaactgaacacgccaccctcgggtggcgttgttttttacattctggctgatggcgctagcgccgggcatggtgagctcttattctgccgtagatcaataatgacgcgccgcccaggataacaatgcatccgagaaccataaatccctgcatgtagctgccggttgtccggtaaaaatagccgaccataaggcctgccaacgtaccgccgccgccggcgccgatgccattaataataccggaggctgggccaatcgcatggggtttaacgttcgactggataatcgaccagatattgggggtaaagctggcggcataataacccatcgccagggtaatgagcgtgattttaaagcccggcgcatcgacaaatggcaggagaaataacatcacgccggggattagtaggcccagtgaagcaataagtacacgtttttgtgtcttatcactgatccatgagatagggattgccagtataaccgcagtcagataaggcagagaactgaccaatgctttactgaatccggtatagccgagagaattgacaaccatgggtatccataacgtaattccccagaacaacatcccttgagtgatgtaggtaaaaataaggagtaggaagggggttccgcccagcgattccagggtaagtttagttttctctgttggcgccggcgcacgataataaggcgcttcttcctgttttttcagcattgttatataaagtggaaccacaacaacaatgccgatcacaccagtgataataaaaacatttcgccaaccgaaggcagcatccagcggggacaaaatcataaatcccaggcctaatgccaggaactgtccataatactggataatgctgttcgcctgcgtccgttctttgtctgaaaaccagtcgctggcgaagcgggactgctgcggccaataaatgccttcggtaatgccaagcaccagccgacaaatcaaaataacgtacactgacgaggtaaatccgacaaaaacggtcgcaatcgaccagattagcaccatcagaatgactatttttttcggatcgtatcgctgggtaaatacgccgccaaaaatatttgaaaaggcatagccaataagaaatatggttaatacaatgctggccgttgcgccatcaatattcaggtcgtgtgtaatcgtaggtaacgtaacggaaagattagaacggtcaagataagcaacaaaaaggccgaacattaatgtcgcgccgatccgtagccatttttgcattgaggtcatttttcaactccgtttggccgcgcgccaaaatcaatttgacgaaataatatctcaccggattttatggtcatttgtggtaccagcacatgcgtccccgtgagcgtttcaccatgaatatcggcaaattcaacatgcctgttttttaatttaaagatggcgatatcggcaaatgccccaggggccagcgtaccaatttctgctgccatacccattaaaactgctggggtatgggtacaggcgttaatgacatcggtaagcgcgacgccgagtgctaaatatttcgataaaatccatggtaaggcgtaaacaggccaggcgagtttagtgatggttgagagatcgctactgatgatatccggaagaaagccattggcgatggcccggcgtgccgtgttcattgaaaaatggctgcgaccattggcggcatcaaatataacgcctctttcccttgcctgacggacttcggctaagaccacgccttcatcagtaagaatggtgctacctttgccgtgaaacgcatgagcgataatatcgcctcggcgtagcaaggagacaagttctttcatgggaacgacgggatgagtcgagtgtattgccacgggacactttaaatcgttggcaatacgaagggattcagtcagcggttttaagccatattcagcaatgtcctcagtctgaaccttgagttttaatccctgaagaacgttgcgatactgacgaaacagcgcgtggatcttattttcatcaatattgtcaggatcataattttcttgtgaccaggtttggcccggcggcgacacggtcaaaaacgctttgattcgaactttgctggcgcaaatcaccgttcggtagaaggcatcaaagtttgccgtaccggcagaacctgcatccacgacggtggtgacgccattcggcggcatgtacatatcaggcctgacgccgccttccgtcgcgtcataaaaaacatgcgcgtgataatcgataagaccgggagtaacgatcatgccgtcggcatggataatccgggtctccgaagttacaggatatttatcggcatcaacgataatatcgttaatgatgcgtaaattgttaatctcattaatattacgagcgggatcgatgatatgtccaccggtaattaatatatcatttttcatcataatctcttaaaatagtaaataattatggcagcccttaaaaatatattaaaaagtgtgttttgagcggatgttatgttggattaaaaatacggttattggtagggagagcttaggataccttattaaaaaggtaatcgggcttatgcactaaataagactttagcgcttgctaatatttagggcgtaagtccatgggagtctgggagcattcacaaaacaattattatcttaagctttttagagaaaccgtgagcgtattcaaccctttttaataaaaaatcaggtaaagtattattcattccgtgaatgttaaattaataatgataaaaactgtgttctattcattagccaataaaaaggccctcattactatgagagcctttatcttgacgcttatgtaaaagcgaacttatttcttcgctgcgcgctcgaaggaggcaacgatttccgctttagccgcttcggcgttgtcccaaccgtcaactttcacccatttgcctttttcgagatctttataatgctcgaagaaatgagtgatctgcgctttcagcagttccggcagatcgttcacatctttaatgtgatcgtactctttgctcagtttggtgtgcggtacggcaaccagtttcgcatcttcaccggattcgtcggtcattttcagtacgccaaccggacggcaacggatgacggcgcctggctgcagcgggtacggcgtcgggaccagaacgtctaccgggtcgccgtccagagacagggtatggttgatgtaaccgtagttgcacggatagaacatcgctgtggacatgaagcggtcaacgaacagcgcgccgctctctttgtcaacttcgtatttgatcggatctgcgttagccgggatctcgataacgacgtagatatcttccggcagttctttacccgccgggacgttgagtaagctcatgtctgtttcctttgaatttatgacaaacaagtggcgagtattatagccaactcacgccgaaagtcttcgcttgttttcgtttccgcctcatctggcgcgtcgttgcggagcataaacgacaaaggttaagaaccggaaaaatcacgggcctgataaggcaacgccgccatcggacatgttattgcccaatggcggcttcatgcgttattccgcatggtggtaaaaattacgcgtccgggtattcgcggataaagcgttccacatcgtcaaccatatggcggttgccgacgaagaacgagcggcgctggtgcaggctttccggaatgatatccagaatacgttctttaccatcgcttgctttgccgccggcctgttccgcgaggaacgccatcgggttgcattcatacagcagacgcagtttcccctgcggatggctggcggtgctggggtagagatagatgccgcctttcagcaggttgcggtggaaatcggccaccagagagccaatgtaacgtgaggtataagggcgacttgttgaactatcctcttcctggcagaatttgatgtacttcttcacgccattcgggaatttaatgtagttaccttcgttaatggagtaggttttacccttttccgggaaacgcatacgttcctggcacagacagaacacgcccaacgacggatcgtaggtgaaagcgtgtacgccgcagccggtggtgtaaaccagcatggtggacgagccatacacgacatatcccgcagcgacctgtttgttgccgggttgcaggaaatcttcttcggtgaccggcgtgccgacgggcgtcacgcggcgataaatcgagaaaatcgtaccgacagagacgttaacgtcgatgttagaagagccatccagagggtccatcagcaccacatatttcgcgtgttcgcagccttcaaagacgacaatttcgtcctcttcttccgatgcgatgcccgctacaatatcgcgcgcttttagtgcagctttcagtttctcgttcgcgaacagatcgagtttctgctgaacctcgccctgtacgttctcagcaccgctggcacccaggatatcgaccagaccggccttattgatatcgcggtggatgatcttggcgcccaattttattgccgacagcaaagcagtgagctcaccggtagcctgagagaactcgtgctgcttttcgacaataaattcacctaacgttttcataacactttccctgcaattgattggagtaaagcgaccgtaacaatcttaacaaacatttcagatgatgcgctcaggtgaatcgcgccagcaaagtacagatttacctgaaatgcgtttctcacttgccagacatgtgcgtaaaatggctcgcagataaaaaaaggatagtgacgtatgcgcattcatattttgggaatttgtggcactttcatgggggggctggcgatgctggctcgctcgcttggtcatgaagtaacgggttcggacgccaatgtgtatccgccgatgagtaccttacttgagaagcaaggcattgatctgatccagggttatgacgccagccagctcgatccgcagccggatctggtgattatcggcaatgcgatgacgcgcgggaatccgtgcgtggaagcggtgctggaaaaaaacattccctttatgtctggtccacagtggctgcacgactttgtgttgcgcgaccgctgggtactggcggtcgccggtacccacggcaaaaccacgaccgcaggcatggcgacctggatactggaagcgtgcgggtacaaaccgggctttgtgattggcggcgtaccgggcaactttgaggtttccgcgcgcctgggagagagcccgttctttgttatcgaagcggatgagtacgactgcgcgttctttgataaacgttctaaatttgtgcattactgcccgcggacgctgatcctcaacaaccttgagtttgatcatgccgacatcttcgacgatctgaaagcgatccagaagcagttccaccatctggtgcgcatcgtgccggggcaggggcgcatcatctggccggaaaacgacatcaacctgaaacagaccatggcgctgggctgctggagcgagcaggagctggtgggcgagcagggacactggcaggcgaagaagctgactacggatgcttccgagtgggaagtgtggctggacggcgaaaaagtcggcgatgtgaaatggggcctggtcggcgaacataacatgcacaacggtctgatggcgattgccgccgcgcgccacgtgggcgtcgcgcccgcagaagcggccagcgcgctggggtcatttattaacgcccgccgccgtctggagctacgcggcgaagcgaacggcgtgacggtgtatgacgattttgctcaccacccgacggcaattctggccacgctggcggcgctgcgcggtaaagtgggcggcaccgcgcgcattatcgcagtgctggagccgcgttctaacacgatgaagatggggttatgcaaggatgacctggcgccgtcgttagggcgtgcggatgaagtgttcctgctgcagccgccgcatattccgtggcaagtggcggaagtcgctgaagcctgcgtacagcctgctcactggagtggcgatgtcgatacgctggcggaaatggtggtgaaaaccgcacagcctggcgatcacatcctggtgatgagcaacggcggtttcggcggcatccatcagaaattgctggatgggctggcgaaaaaagctcagaacgtaacagcgtattaaatgactatgcggtcagccagccttgtggctggctgttttatatggggcatcttgccatcgaaagcgcattccgctcgccgggagacgttaaagcaatactgaaaaatcatttgccgctcagtattgaaaaagagtagacgcatatccttaaagtaatcagtgtaatacactaagagtgttccgccggttgccgtatgcgggacgaaaagagccagttcgcaataacagatgaaggtttcgtgatttataaacgtcatcttctgcctttcaacgtttgcgatgccgcctggctgcgggcatcgtccagtcataacaatgctgatcctgtcgcatttatgcggtcagattcagattgctcagaacccagcccgccagcaaattctgtactgaaggtaaccacagcgcaatttgaatgttgttaactgtatgttcagttcatttgtgctaatatggttatttacgaaattttcgttctattagagtatcatgcatgtctaaacatcaaactcaactttccttactgcaggatgatatccgcagtcgctatgacagccttagcaaacgtcttaaacaagttgctcagtatattctggataacagtaatagcgttgcttttgacacggtagcttccatcgcgcaacatgccgatgttcccccttcgacactgattcgttttgctaatgcgtttggttttagcggatttaatgaaatgaaacaggtatttcgccagcacctgatggaggaaacagtaagctataccgagcgggcgcgtctgttcagacagaaaaatgcggatgaaggggaacctaccccggaaaagccgggtgaaattctgaagctattttcaatggtgaatgcacaggtattacaacaattaccggtgcagattaaaaatgagcagttggatgcggcggtaaatctgttagcgaaagccgacaatatttatgtgattggattacgtcgttcgtttagcgtggccagttatttaacctacgcattgcgtcatctggagagacgggcatttttaattgacggtattggcggaatgttctctgaacagctaagtatggtcagccccgacgatgtcgttattgccatcagctactcgccttacgcgcaggaagtggtggaattagtcgagcttggcgcgaaacgcggtgcgcaccatattgcgataaccgatagccaggtcagcccgctggcagcgttcagtgaagtctgttttgtggtacgtgaagcgcaggtcgatggtttccgttctcaggtcgcgtccatgtgtctggcgcaaacgttagcggtttcactggcgctggcgacggagtaaaaaaacaagccgatgatcgtatttagcgatcatcggcattgtggtgaaacttaatcagaataacgttcggtttgaattggctgcagtttttttctgcgttttgctaacactacgctctccattttctccagcgaaatgccttttgtttccggcaggtaacggcagataaagaagtaactgaagatgcagcagatggcaaatatccacattggaaatgcgccgtggaaatgcgaaagtaaatacgggttttcattaatcatcgggaagaattgcgaaactaaaaagtttgccatccacataaatccgaccgaaatactcattccctgcgacctcatccggttagggaatatttcagaaataagcacccatgcgcccacgccccaggaaagcgcgtagaaaatcataaagaacagcataccgaatagcgcgaaataaccggttgcctggctgtacagcgcccatgaggtgagcaacaagccgatgatgctgccgatagtgcctttacgcatcagcgacaaacgccccatcttatccataatcattgcgccaataatggaaccgataagctgaatcacgccgatccagattgtctggaacagggcctcctgggcgctaccggtcacatccttaaggacgattggcgcgtaatacatcatgacgttaacccctgttacctgttgcagcatagcgatcatgcagcccaggatcaggatgaaacgcacgttcccgtcgcggtaattgagtttttgatgggcgtttagttggtcattttgcagtgaggtttttatatcggcaagaagatgtctggcatgttcttcgttggatattttggtcagtatttttagcgtctcctcctcgcgaccaatcatcatcatccagcggggagattccgggattaaaaagactaaaatacagaacaaaatgcagggaataatacccgcagcaaacatatagcgccagccaagttcaatgagccaggtatccgctgcaatcgatgctattttgtagttaacgtagaagatcagaatctgaccgaaaacgatagcgaactgctgcatacttaatgctctgccgcgcatgtttttcggtgagacttcagacatatacatcggtgatactgttgccgccaggccgactgccagtccaccgataatgcgataaatcacaaaatgggtgaacgtgtaggagagggaggtgcccactgcggaaatagtgaataacagcgctgaaaccatcaatgatttcttgcgtccaaaacgtttggataaatatccggcgctaaacgaaccaataacgcaccccaccacaacgcaggaaaccgcccagccggtctcagcaggagatagatgaaagtagctggtcagtgaaccaatcgcacctgaaataacagcagtatcgtagccaaataatattccgcccagtgcggcaatcgcgcagatgcgtaatatgtaacccgtattataacaactatctgatgtggacataggtagattatctccagaataaacttcatctatctgtttgaatttagtgaacaaatagacaaattcatcttatgtcggtcattgccgtagcgctgccgacgatcttatagctattgagaactctcgtttcacaacctatgttttaatttcaaaacgatcaataatgaaacttatgttttgttatgggtatcacatttcgaatttcataatcctggcgttttttatcgttaagatgctgcgttttacgcagtgctctcctctatcttgatgaagttacttgattttattgatttcgcgacagtacctgaactcaatttgtcaggggccgtactttttgttctttcctggaacatctccatttcgtgatcttttgcatggaatttttcttctaatgaatgcaaaaataaaatgaaaaatttcattggtgtgttgtttcctcaacaggcaagggagggattatgtctcagagaagtaagtacaattcggcctatgtgtacgtcctgtgttgtattgcggcgctggctggattgatgtttggttattcaacggcggtgattaccggagtggtattgcctttacagcagtattaccaactgacgccaaccgagaccggatgggccgtttccagtatcgtgattggttgtatcatcggcgcgctggtcggtggaaaaattgccgataaactggggcgtaaacctgcgcttctgatcattgcgatcatttttatcgcttcttccttaggggcggcgatgagtgaatcgttcatgatcttctccctttcccgcattgtgtgtggttttgcggttgggatggccggaacggcatccaccatgtatatgtctgaactggcgcctgctgaaattcgcggcaaagcgctgggcatttacaatatctccgtggtatctggccaggttatcgtgtttatagtcaactatctgatagcaaaaggaatgcctgctgatgtgctggtttcccagggctggaagactatgctttttgcccaagtggtaccctccattgcgatgttagcgattacgcttttcctacccgaatcaccggcatggtgcgcccgtaacaaccgcagcgaagctcgttcgataaaggtgcttacccggatctacagtggattaacggccacagatgtggccgctatttttgacagcatgaaagaaaccgtacgttcacaggacaacgtcgccgggggagaacgcaccaacctgaaaagctcgccggtgctccgctatattctgttggttggatgctgtatcgccgttttgcaacagttcacaggcgttaacgtaatgaactattatgcgccgctggtgttgcagaacagcagtaccgaagtggttatgttccagaccatttttatcgcggtatgtaatgtggtgggcagttttatcggcatgatcctgttcgaccgctatggccgtataccgattatgaaaattggtaccatcggctcaattgtcggcctgttgatcgcgtcatacggtttgtacacccacgatacaggctacattaccatctttggcatcctgttttttatgctgctgtttgccgtcagctggagcgttggcgcatgggtactgatttctgaggttttccctgaaaagataaaaggttttgggatggggctggcggtgagtctgatgtggatagccaacttcctcatctcactgttgttcccggtcataaatgataacgcctggctgcaggagaccttcggcggcgctttctcgatgtggatttttgtcgtctttaatttggtctgctatgtctttatttctcgttatgtgccggaaacaaaaggggtgccgctaacagaaattgaacggctggccgagaacaagctgcgtgaaattcaggggaaacgtcgcgatgtaatagcctgatacctctccaatattagcggagaatatccagagatattctccgctggttacacaacctttactccctccagcgagtgcgcacaggatataccctgttgaaacctccccagtgtttaccacctctacgtaactaattgatccataataatatcggcaaatagggtaagtcttcttctgcatcattattttattgcgtattcctggtgggggccgtgccgtaaatacgctatatacaaaacagggaaataatttaagagaaggcggatagcgatcttatgagcgtgtgtggcgcagagttgaataaaaaagccagccgcagaggacggctggcaaagtaccactcaacgaagtgttatcgcgggtagtctggtgagttaatccacgcgtggttctcttcccaggtgaaacgccattttcgtagcgggccggccatcacgttcagatagtagttatcgtaacccgcgatggtggcaaccgggtggtagcccttaggtactttcactacatcccggttatagaccgccatacattcatccaggctgcgatcgtcggtgtagacgcgctgtaagcagaatccctgaggtggattgaaacggtgatagtacgtctcttccagataggtctcctggccttcaactgccgtatcgtgcttgtgcgcgggccaggagctggtatcgccttcattagtgtacacttcaacgactagcaggctgtcggcgagctggctatcaggaaggatgttatgcaccaggcgctgattgcgcccttttccccgatgctctaccccgacctcttgtggcgagatcagacgtaccggaagctctccgaatcccggcgcgctgcatacggccagctcaaggtcggtttcggctgtcactttcgcctccgtatgatgggggaggtaaaccgaataagccggaatgcgttcaaacggactcatgcgctgaccaatccgatagaaaaaactgtcggcggccttaacgctggccagcccggcaaccagcaccagacagcgttcacgctcatcggacggcagggttatcgactctccagccttcaactgccagacatcaaaaccgacatactcccagcctgcattttgaggggaaatgtgttggatatttcccgactcagaggtacaggtactcagcaagttggccataatcttctccttcctgaaagcgtattaaccgagagtcggcatactgaactccgatacgatctgctgtccgttcggccaacgcgaggtaacggttttcatccgggtatagaagcgcacgccatccggcccatggacgttcagggcgccaaacaccgagcgcttccagccgccaaaagagtgaaatgccatcggaaccggaactggaatattaataccgaccatcccggcttcaaccgactgggcgaattcgcgcgcatagtgaccgttggtggtgaaaatcacgctgccgttgccgaattcatgggagtttaccgtgctaatggcggtggcataatccgggacgcgcacaattccgagaaccgggccaaaaatttcttcacgccagatggtcatctcaggcgtgacgttatcaaacagagtgccgccgacataaaagccttcaggatatcccgccacgctatagttgcggccatccatgaccagagttgctccctcgctcacccctttgtcgatgtaacccaacactttctgttgatgagcacgtgaaacaaccgggcccatttcattttcatctttgccgcgcagctctcccgggccgatacgtagcgccgcaatcagcggtttcaggcgttcgatcagacggtccgccgtttcatcgcccaccgcgaccactaccggcagcgccatacagcgttcgcccgcggaaccaaatgctccgcccataatggcgttgacggtggcgtccagatctgcatccggcatgacgattgcgtgatttttggcggccccgaaggcctgtacgcgtttgccatgggcgctggcggtggtatagatatgttccgcgacggcggaggaaccgacaaagctgacggcctgtacgcgagggtcgctggtcaacaggctagccgcctcattgccacagtgaacaacgttaaacacgccgtccggcaggctagcctcctgcagaagctgcgccatacgtaacgatgcggacggcaccagtgcgggcggtttcaggacgaaggtattgccgcaagccagagcaaccgggaacatccacataggcaccattgccgggaagttaaacggtgtgatgcctgccacaaccccaagcggctgcattaatgaaaagctgtcaacgcctgagccgacgttaaaggagtactctcctttgctgaggtgcgggatcccgcaggcaaattcgacaacctctatgccgcgcgtcagctcgccaagcgcatctgaccagaccttgccatgctcgctgacgatcagcgccgccagttcgtcccgatgcttttccagtaatactttgaattcaaaaaggatacgtgcccggcgtagcggagtcattttactccatgccggaaaagcctcatgtgcgctttgaattgccgccagcatctcctctcgggtgctctgggtgacctgacgaattactttaccggtggccggattagtcaccggtagcgtctcgccgctgctgctcagtgtcgttttaccatgaataaaattgccgactgtttccatctcttttttatcctcttaaaccgatgttgacgacgttctgactgagcggtcacaggaaagcctggttatcttcagcctaaaacgcataccgtattcaatgtaaattttaggattaaaaatttcaaatttatttttatgaaattttattttgaaagtttgacggctgatttttatacgagggtatgtgcagcaagaaatcaaaaatataattaacttattgatttttatcgtttttatttggtgtgtcatcaatggttgtctgttgtgacgaggaaagatttggaaaaaattatgatctatatagcatttttgtttcatttggtgtggtataaaaattcaaatttcaggggggtttcggcaccacagtttcggatattggagggtaaatcatgcgcttgtgcttctgtccttcagaacgagagaataaggctcagccccagttggcgtatgtgagtcaggtcagtgagagcaatggtccgtttgtccggttcatgcatatgcacccacagaccgttgaactgattcttatcaccgaaggagacggggagtatttcattggcgatcgcatctacccagttcgtaaaggcgacctggtcatttataacagccaggtggtgcatgatgagtatctggaaagcgggcggccaattggcactatttgttgtgggattaacaatatttcgtgtccgggtctacgtgagaatgcgctaataccggatgatattgtgccggttattccactgtatcaccattatgcgacggtggaaaaactgatgagctccgtgtttaccgttattaatcagcatgcggtagaagggccagcaatggcgcagctattgacccaggtagtactcaaatacattgagggaaatgtcttattgcgcacaggtaacgatgccatacagcgccatgaaaatttacttgattcaataaaatcctatattgatcgcaatttctatgagccaattcggctggatacgctggcgacgaaatttaatgtcagtccttattatgtttcccatgaatttaaacgccgctatggttattcaccgatggattacctgataaaacgtaggctgggggaggcgcaatcgttactaaccacggatgaaggcgggcgcgaaaagatcacctctattgcttatcgtgttggctttagcaaccttagtcattttcagaattacttcaaaaataaagtagggaaaacgcccggtcaatatcgcaaggactatcgtaaagctaattatttattatttgaatattaatgcttgctaaaatttaatcgtcatgagaatggtcgcaatactgcggccattttttatttgtcggtatattttatgcgtttatctatagcgcgaaaagtctggcaatatcattaaagagtgatgatttttttgtgatacctgacgcatttatcccacttcttcaaccaggatagataaagtttttcaggctacaaaaagtaatatgttgtccatcaaaggttaatttgcatcgcggtatgcagtaaaagcgtttcattaagtgggagccagcaatatgtacaatgtaaaaaagagcattaagttggggattgcgcctatcggttggcgcaatgatgatattcctgagattggtaaagaaaatacatataaacaaatacttagtgatgccgcgctcaccggtttttccgggacggaagttggcggttgttatccgcaggatcctgctgagttaaataaagagttaatgcttcgcggactggaaataccaggccagtggttttcttcctttattattcgcgatggtattgcatctgcgatgaatgcttttgaacagcattgtgcttatttgcaggcaatacatgcatatgtcgccgttgtttctgaacaaacttatagtattcaaggcattatcgataagtgcgtttatacagagaagcctaacttcagcgacagcgaatggcagcttttatgcgaaggacttaatgcgcttgggaagattgccaatgcgcacgggctgaagctcgctttccatcatcatatgggcaccggtgtgcagactctgccagaagtggatcgactcatggagaataccgatccgcaatttgtacatctgctgtttgataccgggcatatatatgtttctgacggcgatgtcatgccgctactgagtaaacattttgatcgtattaaacacgttcattttaaagatgtgcgtaatgaaaaactcaaagcatgtcgcctcgcgaagaaatcattcctcaattctttccttgatggtgtgtttaccgtccccggcgatggaaatattgattttaaatccgtattagcttatctggtcgggcatcaatattctggctggattgttgttgaggccgagcaggatcctaagaaatataacccattggaatatgcgcaaaaaggtaaaaagcatattgatgagttactgaaaaattatctttaattgaaaaggaaacagaaaatgactttaaaagcaggtattgtaggtatcggcatgatcggctccgatcacttaagacgtctggccaacaccgtgtcgggtgtagaggttgttgccgtatgtgatatcgtcgcgggtagggcgcaggcggcgctggataagtatgcgatcgaagccaaagattataatgactatcacgatctgattaatgataaagacgttgaagtggtcatcattaccgcatcaaatgaggcgcacgccgatgtagccgttgccgcgctaaatgctaacaaatatgttttctgtgaaaaaccgctagcggtgacggctgcggattgtcagcgtgtgattgaagcagagcagaaaaatggtaagcgcatggtgcagattggttttatgcgccgctacgacaaaggttacgttcagctgaaaaatattatcgacagcggcgaaatcggtcagccattaatggttcatggacgtcattacaatgccagcacggtgccagaatacaaaacgccacaggctatctatgaaacattgattcatgaaattgacgttatgcactggctgcttaacgaagattataaaaccgttaaggtttacttcccgcgccagtccagcctggtgaccactctgcgtgatccgcagctggttgtaatggaaaccacctccggcatcaatattgtggttgaagtatttgtgaactgccagtatggctacgacattcactgcgatgttaccggcgagaaaggaatggcggagctgccaaccgtcgccagcgccgcggtacggaaagcggcgaagtatagcaccgacatcctggttgactggaaacagcgctttattgatgcctacgacattgagttccaggatttcttcgatcgtctgaacgcaggattgccgccggcaggcccaacgtcatgggatggttatctggctgcggttaccgctgatgcctgcgtgaagtctcaggaaacagggaataccgagattgttgaattaccctcaaaacctgatttctacaaataaaccttccgcgtattaaaactcctgccggatagcgatgcttaagcgtcctatccggcatatcacaatttattatcttcttttatccggaacttccctatgaaaggcagactcatctcttccgatccgtatcgtcagcaattccttgttgagcgtgcggtctctttttcgcatcgtcagcgtgattgcagtgaattaatcagcgtcttaccgcgccacgcgttacagcagattgacggattcggcggcagctttaccgaaggtgcgggcgtggtattcaacagcatgagcgaaaagacgaaggcgcaatttctttccctttatttttctgctcaggaacataattacactctggcgcggatgccaattcagagctgtgatttttccctgggcaattacgcgtatgtcgattccagcgctgacctgcagcagggacggctctccttttcccgcgatgaagcgcatttaataccgctgatttccggggcgttgcggttaaatccacacatgaagctgatggcttcgccgtggagtccgccggcgtttatgaaaactaataacgatatgaacggtggcggcaagctgcggcgcgaatgctacgccgactgggccgatatcattatcaactacctgctggaataccgccgccacggcattaatgtgcaggcgctctccgtgcagaatgagccggtggcggtaaaaacctgggactcctgtctgtatagcgtggaagaggagacagcctttgccgtgcagtatctgcgtccgcgcctcgcccggcagggtatggatgagatggagatctatatctgggatcacgataaagatggcctggtggactgggctgaactcgcctttgctgacgaagctaattataagggaattaacgggctggcattccactggtataccggcgaccatttttcgcaaatacagtatctggcccagtgcctgccggataaaaaactcctgttttccgaaggctgtgtgccaatggagagcgatgccggtagccagattcgccactggcatacctatctccatgacatgattggtaatttcaaatcgggttgtagcgggtttatcgactggaatctgctgctgaacagtgagggcgggccgaatcatcagggtaatctgtgtgaagcgcccattcaatacgatgcgcaaaacgacgtgctgcggcgtaaccactcctggtatggtattggccacttctgccgctatgtgcgtccgggggcgagggtcatgctttcttcaagttacgataatcttctggaagaggtgggatttgtgaatcccgacggcgagcgtgtgctggtggtgtataaccgcgatgtccaggaaaggcgttgccgggtgctggatggcgataaagagatcgcgttaacgctgccgccgtcaggcgccagtacgttgctatggcggcaggagtcgatctgaatgatgaagctgggatttaatgaagcgacctgtatgcgaaactccacgctggcacaggatgttgtgttggcggaacgttttggctatgactacatcgaaatccgtctggatatgttgcaggagtggttgcagaaacatacgttaagcgagctggcagacattttcgccgtcggccaccttaagccctggggctacaattcgctggaagacattacgttttgtgatagcgaaagctgggcggagaaactgcggcagttggctttcgcctgccatgctggctcagtggtggggggtgattgtctggttgtggtgcccaccattcgtcaggggggaaattttccgccaggggaaacggtgaaagattcagtgaagcgtctgcgcgagatggcggcagtggcggaagaaagccggatgcggctggcctttgagccgatcggttccgcaggatgctgtgtgcgcagtcttgccatggcgatggagatcgtagatgcggtcgatcgcagtaatgtcgggctggtcgtcgatgcctttaatctttacctgcacgatcaatggcgggatctgaccacgcttcgccagatccctgtggaaaagatcttcgtttaccatattgatgacgccgataatctgccgctggcaacgctggagcattgccatcgtctgtttcctggcaacggcgtgatcccactgcatgagatcacgcatgagctagtgcagaagggctatgaggggatctgttcgctggaactgtttaaccctggctactggcagatggcggccagcgaagtctttgcgataggggcggaaaagactcgccccttcttaacagcttaatgttgccgcagcaagagatggacaaccgccgcgcccagcagcgcgcaggccgcggccagaagaaagacctgctgatagccgataaacggcgtcagcaggcccgctattggtccggtaaatccgtaggccagatcctgaaacgctgaccagacgccgagggccgtaccacgaatctccggtggcactctgcgcacaacctctacgcccagcgatgggaacatcagcgaacagccgcagccggtaatcgccgcgccaatcagcgcagcgcctgctgacggagcggcccacattaccgccagtccggtcccctctaccagtagtgaaaaggttgcgaccgtggcgccgccgtaacggtcgggaaatttggcgcagaaaaagcggacagcgataaacgcaatgccaaacagcgtcatcgcaaaaccggtgttatcccagtgacgctcgttgaaccagagggcggtaaacgcgcttagggtggcaaaaccaatgccctggagcacaagccctgttccgggccgccacaccaggccgactacccgtagcactggcacgcggggacgggctgttgggatattccccggaatgccatagatgactccgctggcgatgatcggcaacagcacgacgaggagcgccggaagcgccaggccggccctggcgtaaagcgacagccccagcggcgcgccgatagccagcgcaccgtaggtcgccatgccgttccaggaaataacctgacccgcgtgggtcgagcccgccagccacatcccccaggttaaattaccggtcaaaatgaaactttcaccgatgcccagcagcacacgaccaacaatcagtatggcccatgcgagcagcggaaccgggtgagcgattagactgaccagcatcagcagacctgatgcggcgcagtagaactgaccggtgataaccgtccgacgtccgcctgacgtgtcggcttttcgacccgcggcgccccgggtaagcaaggtggcgataaactggctgcctaccgcgataccgatcaacagatcgctcagatgcaactgctgctgaacgtacagcggcagcatgactaacgggatgccaatagtcagatagttgagaaacatcgcggcgctgatgcgaaacagcgtgatcgatgtggaatgttgtgtgagagctggcatggaatcgtccttgaacacgccccttgtccgatgcagacacggggcgtgatgaggcaggcattaacgtgccgggcggtattcgcgccagtagtcgataagcatgcggtatttttgtttcaccgttgcgatgagctgttcatcgttaagctggccgcctaaccactggcgtgacggttcgccaaagatggtccggccgacggcgaaacctttcacccagggcatatccgctgctgcggcgaatcctgacttcaactcgctttccggtgcgtccaggccaagtatcaatataccgcgacattcagggtcataatgctcaatatgctggctgatttctcgccaacgatctgggcttaacggcggcagtttccaccagtccggcaggatccccagttgataaaaacgttccacaatctgaggatagtattgctcattttggtctgccgcatcgcgcggcaagatgacttccagcagcagatcgtgaccagactggcagcaggcgcggtaaacctcgtcaatgagcgcctcttgttcaagacgtaccgactctgcatcgagtggatgatagaagaccagacatttcacgacgtgctcttgcggccagctgacaagctgagagccaatatcgccatgttccagcttcagcggatacgaaccgggcatctcaaccggtcggccaatccaccatccctggccggtcacgtcgttaagcgcctgctgaccaaaggtggtatcggcaaggatgccgctattattctgtaaaccggcctcaagcgccgcctgacgtgccccttctagcagtagcatcttcaggggggggatcgcggattcactggcgccgacttcatttgcgatatccaccagttgcttgcgatggtcaaaggcgaatacgcacagctccggccagtgctgtttacgggttgtgacccgatgaaggtgattcagccgcgggtctttgtctggccgggtgatggattgttcacgcgcgaggtagtcgtccagctcttttttggttggcatggcgggggcacaaccgtggcgcgataccactaacgcgccgcaggcgtttgcataacggcaggcttgctcccagctttcatcgttcaggtatccccgcagcagtcctgacataaaggcatcgcccgcgcccagaacgttcagaacgtctacgcgaacgccgctatgtatcttcacctgcgaccagtcatcggcgatgttgccttcaaagactgagcagcccagcgcgccgcgtttgcacaccagtacggcctgggtcaactgacggacgcgccgcagggcggtcagcgtgtcggtactgccgccggcgatatggaattcttcttcggtcccaacgatcagatcgaaatggcgcaatacctgctggagctgttcggtaacctgtgatgaggcgatgaaacgcgtttcaccgtctcctagcgacgtcaggccccacagtacggggcggtagtcgatatccagtgcccgccgcagcccgtgtttttgcgcatactccagcgctttaagaacggcggcgcgcgtattggggtgagaaagatgggtaccggtgacggctaatgcgcgtgaagaagcgatgtaatcttcgcggatatcctcaggtgttagcgccatgtccgcgcagttatcgcggtagaagatcagaggaaaggtgtcctgatctttaatgccgaggatcaccagcgcggtcagacgatcgcgatccgacagcaggcactgcgtatccacaccaacgcggtttaattcttcacgaacgaaacgtcccatatgctcatcgccgacgcgggccagcatagcggaacgtaatccctgaatggccgtgccgtaggcaacattgcctgacgatccccctaaatatttagcgaaagtcgtcatatcctccagccgtgacccgatttgttgaccatacaaatcaacggcgactcgtcccagacagataacgtccagcggcttttgctcactactgactgctttattcattgacatatcccctaacagaagacggtgttatttttgctcatactaaggtttggtgatttcattttcaataaaaatggaaataatgttttcatttattgtttgaacaagatcacagaaatggcatttccgggcaacgggcatgatcgttttttgttgtgttttttgttttaattgattgattataaatgtgttatttattttaaaatcgcatggaagataaatttcattttcatgaaaaatacgcctgaatgtcgaaattttttaaccgttttttgatctccttcccataaatgaaatataaattccatataattgtgagaacggaaattttgatcctatgataagtctctgtgtttttggggctgaagcgatgcataagcaggcaacgacagccgaacggttgataaaagcaggtggggtacatgaaaacaatcaggttgaccatggcgcaggctttggtgcgctttcttgataatcagtacatcgacgtagacggcagcgaaatcaaatttgtaaaagggattttcgccatttttggccacgggaacgtcgtcggattggggcaagcgctggaagaggactgtggccaacttagcgttcatcaagggcgtaacgaacagggaatggcgcatatcgcgacgggatttgcccgccagatgcgtcgccatcagatttatgcctgcacctcctcagtggggccaggggccgccaatatgatcaccgcagcggcgaccgcgacggctaaccgtattccactgcttttgctgccgggcgatgtgtacgcatcgcgtcaacccgacccggttttgcaacaggttgaacaagaacacgatttgacgctgagcaccaatgacgctttccgtgcagttagccgctactgggatcgcattacgcgtccggaacagctaatgagcgcctgtatcagcgcgatgcgggtgttaaccgatccggcggatacgggggccgtgacgctttgcctgccacaggatgtgcagggtgaagcctgggattatccggattattttttcgctcgccgggtctatcgtcttgagcgtcacgcgccgacggagccgatgctgaacgaggcggttgcgctgattcgccgccaccagcggccgctgatcgtttgcggcgggggcgtgaagtactcgcaggctgaagaggcgctgctgagatttgccgaacgctgtcatctgccgattgctgaaacccaggctggcaagggagcgctcagttctgcacacccgctgaacgtcggcgggattggcgaaaccggttcactggcggcgaatctgctggcgcaggaggccgatctgattatcggtgtagggacgcgctataccgatttcaccacctcctcaaagtggatcttccagaatcccgacgtgcgctacttaaatatcaacgttagccgctttgatgtcttcaagctggatggcgtacagatgcagggtgacgctcgcgtcgccctgacgcagcttagcgaacggctggcccaggagcattatgcttcgcaatggggtgagactattcaccgcgtccgctcgcaatatatggcggaagttgagcgcgtctatgctgtggaatatagcggagagggcttcaaacctgaaattgaggatcatatggatactcaaaaggtgtttgaagagtttaatgagattacgcggtcgtggctgacccagacgcgcgtgttgggtgtgcttaaccggatgttgccggaaaacgcgctggtggtggcggcggcgggcagcctgccgggcgacctccagcgtgtctggcaaagccgcggcgagaatgattaccacgtcgagtacggctactcctgtatgggctacgaagtcaatgccgcattgggggccaaactggcgcagccggagcgcgaggtgtacagcttcgtgggcgacggttcgttcatgatgctgcactctgagttggtcacttccgtccagatggggaaaaagattaccgtcattttgctcgataacatgaccaacggctgtatcaataatctgcaaatggaacacggtatggacagttacttcaccgagtttcgtttccatcagcaggagagcggtcgtcaggaaggcgggtttatcccggtcgatttcgctcgcatcgctgaaggatatggttgtaaaagctatcgcgtcaccaccattgaacaactgcatgaagcgttggaagatgctcgtaaacagaccgtgagcacgctgatagacataaaagtgcttcccaaaacgatggtgcataagtacctgagctggtggcgcgttggtggggcgcaggtatcccgtagcgaacgtatccaggcggtagcgcgtatgcttgaagaacatatcggacaggcccggcagtactgattaatttgccgtcgttcaggttgcagaagtgtggttattgttctgcaacctgaacgatacagcgtcaacgcattgtttgcttttcagaacggcaaaataaaacgatccgtttttcgcagaactacggatgcttttcttttgcggttttaaatttactattcatgagattaagaggtacgaatgaaaaagcttcgatgtggtgttattggcctcggtcgggtaggtaaaatgcatgttgagaatatgtatttactgcctcaattagatattatctgcgccgccgattattttattgaggagatgagcgattggctttattcggtaaatataacttcagggtataaaaattatcaggaacttttacagcgtgatgatatagaggcagtttttattttcacctcaacggatatgcacgaagagatcgtcacggcggcagcgcaggcggggaagcacattttttgtgaaaaaccgctcagcatgaatgaggatgagcaggcctcaatggcggtgctgagaaaagtgaaagagaagggggtgacgctgcaggttgcctttaatcgccgttttgatcctcagtttcacgaggtctttgagctggtgcgcagcggcaagattggtcggccccagatgataaaaatcacctcccgcgatccggacctgctaccccatgatctgatcaaacgtattggcggtctgatttttgacttcaccatgcatgactttgatatggctcgttttatgatgcaggatgaagtcagcgaagtctatgttaagggcaatacgctgattgatcccagcctgaaaaatattgatgatgttgatacgcttgcggtgatgctgactttcagaaacggcggctacgcgctcattgataacagccgtcgggcggtatatggctatgaccaacgggtggaggtttttggctcagaagggatggcgtatgcggataacgttagtgagtcgacggtgaaagttttcaacagccagcactgcataatgaaaaatccccttcctgatttcacggtccgttatcgcgaagcttaccgaacggaaatattacactttattgattcagtcctgcatcatacgccggttgtctgtaccggcgaagacgcattattggcccagcgtatcgctattgccgcgcagcaatcattaaaaagcgggctgccggtgaaaataacaagcgatatttatctttaactgcatctattaataatgaagaaactctcgcactgaaaagtgtgagagcttttctataccgaggataataaaatgaaagaaatgcaggcaacgctgccccagacattttatataaaaccaggtaagtttatctggagctacctgggaacatttttatttatgttgggcggctgtattgagaacagctggttatctgcctggttaaatacgcaggggtttgatcaggcgcatatcgggcagatttttgccgggtatgggattgtggtcgcgattacctcctggctatccggcgtctgtgtggacgtttttggtcctaaaaaggtgatggttaccggttttatcgtctatcttctggcttccgtcgcgtttctgaactttgcgctacccagccatgattttggcgcaattcttgttacctatatgctgcgtggcgtggggtatccgctggtctgttactccttcctggtacgcctgaccatccagttggataatcaccagcaagggatcggcacctcgctattttgggtggtctataaccttggttttaccatcattgggccggtggtggcggcgtcgttaattcctgagttggggcatatcaacgtgatgtgggccgggatgggcgttgcgctgctgggggttctcttcatgctggtgctggaacgcaatgaattcattctgaaaccgcgaacgacgccggtcttcaaagagttatctgcgggtatctccattatgtatgaacggccacggatcggtctggcggtgattgtcaaaactattaacggtcttggcacctatggttttgttgtcgtattacctctgtttctgctggataagcactttacgcttgaggaatgggcgagtatttgggggattacctttatctctaaccaggtcttcaacattatctttggctggatgggcgataaaattggttttcgccgaaccatccagatttttggcagcatcctgaccggtgtcgctacgctgattgtttactgggtgccgatgatatgggggcataactatgtcgcctttatgctggcgatgtgtttgtggggagccgggctggctggctttgtgccaatgacgccgctggtgccgatgatggcgccggataagaagggggcggcgaactcggccgtgaactttggctccggcctggggaatttcgttgggccagcgctggtctccgttctggcagggttcggcaccggcgtggtgatgtatactatggcggggctctatttattcagcggcatcctggtgcagtttcttaaagtgcctggcgagaaatagcttcaaatattcttcaaaaatcccttatagcctgtgatgttcatcactaaattaaaccggtttttatcaagattgataaagccggttttttcaccctacgttaaattgtactaacggattacggttatttacccactcatatacgttcagggagaaaataatgaatatcgaaaaaacacggttttgtattaaccggaaaattgcaccgggtctaagtatagaagcattctttcgactggttaaacgtcttgagtttaataaagtggaattgcgtaatgatatgccaagcggcagcgttactgatgacttgaattataatcaggtgcgtaacctggcagaaaagtatggacttgaaattgtcacaattaatgcggtctatccctttaaccaactgaccgaggaggtagtaaaaaaaacggaaggattattacgagacgcacagggagtcggcgcgcgggcattagttctttgtccgctgaatgatggaacgattgtgccgccggaggttacggttgaggcaataaaacgactgagcgatctctttgcccggtatgatattcaggggctggttgaacctttgggattccgcgtaagttcgctgcgttctgccgtctgggctcagcaactgatccgggaagcaggttccccctttaaggttttgctggataccttccatcatcatctgtacgaagaggccgaaaaggagtttgcgtcgcgcattgatatttctgctatcgggctggtgcatttgtccggtgtggaagacacccgaccaacggaagcattggctgatgagcagcgtattatgctgagtgaaaaggatgtaatgcagaattaccagcaggtgcagcgtctggaaaatatgggatatcgcggtatttacgcttttgaacctttttcttcccagttggcttcctggagtgaggcggaaatagaggaacaaattaatcgcagcgtgtcattgctgctgcaatgatacagctaatttccaggtgaccgttttcagtttccgcagcgtggtatttacaatgaaaattgcttttgatgtcgatgttattaaacatttacccattacccaaatggtacggcaggtttccgagtgggggtataaatatattgagcagtcgccgcacccgcgtattaatccgttttataaacaccctaaagctggtcgcgataccatgcaggaatataaacgcgccttgcagaactacggtgtggaaatctcgtcatttattgtggtttatcgttggtccggccccgatgaagagcgtcggcgcgccgcggtaaccaactggaagcggatgattgagattgccgttgatatgggcgtacaggtgattaataccgagctttccgggacgccggatgagccggagatttgtgaagagatgtggtatcgctccatggaggaattgctgccgatcgtggaacgagagggaattcgaatcgaaattcagtctcacccctgggatttctgcgaactgaacgatgagacggtcgacatggtgcagtctttgcgtagtgataacgtgacctatctgtacagcgcaccgcatggcttcttttacgataaagggcagggcgacgtcgcaaggatgctgaactatgccggggccgatctttcgcatgttctgctggccgatacgcacaaccacacgcttccctgccgctatatcatgaacccgcctggcgtgaatgcgacgattcatcagcacatcgggctgggagaaggtgaggtcgattttgacgcgctattccaggcactgcgtgaaatggattttgcaaaccgcacgtttaaggtgggcggtgaggcaattatcaccacgtcgctgtttggttatcctgagaaaatgagtgttcaggcggtggaaacgcgcgagcggatcgagcgggagctactcggacgttaaaaacgggtggatttgcctgtaccgcgccacaggctggcgcggtcatttgcggcaattacccttcgttttccgccagctcgcgcagatactggaagatctgacgcgctgatttcggcggtttgttgccttctttctctttcttcgcattgcggatcaatgaacgaagctgttgacgatcggcgtgcggccacagggtcagtacttcggctaccgcgtcatcgccttcgacgatcagacgatcgcgcagatgctcaagtttgtgaaacagcaccacctgctgattatggcggttcttcagcttgtccagcgcctggcgaataggttcaacgtcgcgttggcgcagcatttttccgataagctgcaactggcggcggcgtccttccattttgatacgctgggccagttcaatggcgtcgcgcagatcggcgtccagcgggatcttatccagcgcgtttttccccagatccaccagttccgcgcccaggcgttttaattcctcggcatcgcgtttaatttcacttttactgacccagataatttcatcgtcttcgtcttcgatgtcatcaccgggaacgtcgtcgagccagtcttcgggctgctttgtcatgtcaggctccttaaaaaaagaggctaatgttaccagttaagatgcgcactgaaaaacggttctctgttagacttcagagaaactctctctacattatggcatttgcaatgaaagtaatctcacaagttgaagcgcagcgtaagattctggaagaagcagtttcgacagcgctggagttagcctcaggcaaatcggatggggcggaagtcgccgtcagcaagaccaccggcattagcgtcagcacccgttatggtgaagtagagaatgtcgaatttaatagcgacggcgcgctgggtattacggtgtatcaccagaaccgcaaaggcagcgcctcttcgacagatttaagcccgcaggcgattgcccgtaccgtgcaggccgcgctggatatcgcgcgttacacgtcgccggacccgtgcgcaggcgtggcggacaaagaactgctggcgtttgacgcgccggatctggacttgttccacccggcagaggttacgccagacgaagccattgaactggccgctcgtgcggaacaggcttctctaaaggcggataaacgcatcaccaataccgaaggcggtagttttaacagccattacggcattaaagtgttcggcaacagccacggtatgttgcagggatattgctccacgcgccattcgctctcaagctgcgtcatcgccgaagagaacggcgatatggagcgtgattacgcttacaccatcggccgggcaatggcggatctgcaagcgccggaatgggtcggggccgagtgcgcgcgccgtaccttatcccgcctgtcgccgcgcaagctctccactatgaaagcgccggtcattttcgccaatgaagtggcgacagggctatttggtcatctggtcggggcgattgccggcggcgcggtataccgtaaatccacttttctgctcgactcgctgggcaaacaaattctgcctgaatggttaaccatcgaagaacacccgcatctgctaaaagggctggcgtcttcaccgttcgacagcgaaggcgtgcgtacggagcgccgggacattgtgaaggatggcgtactgacgcaatggttgctgaccaactattccgcccgcaaactggggctgaaaagtaccggtcatgccggcggcattcataactggcgtatcgccgggcaggggctgaactttgagcagttgctaaaagagatgggcaccggcctggtggtgacggaactgatgggccagggcgtcagcggtattaccggcgactactcccgcggcgctgcgggattctgggttgaaaatggtgaaatccagtacccggtaagtgaaattaccattgccggtaatttaaaagagatgtggcgtaatattgtcaccgtaggtgatgatattgaaacgcgtagtaatatacagtgtggttcggtattgttaccggagatgaaaatcgccggacaataatacccgtcatacttcaggctgcaggcgcgttggctgcctgcaacccgaattattcagggtattacacttatcgttaataataaaaaaggaagtgagcaatgcgtaaaagcctgttagctattcttgctgtgtcatcgctggtattcggttcggctgtttttgctgccgatcttgaagataatatggatattctcaatgataacctgaaagttgttgagaaaacggatagtgcccctgaactgaaagcggcattaaccaaaatgcgcgcggccgcgctggatgctcaaaaagctacgccgccaaagctggaagataaagcgccggatagcccggaaatgaaggattttcgtcacggttttgacattctggtcggccaaattgatggcgcgctgaagctggcgaacgaaggtaacgttaaagaagcgaaagcggcggcggaagcgctaaaaaccacccgcaatacatatcataagaagtatcgttaatttttgtgggatggcggcttcgctttatccgcaggtcgccatccggcaaactgtaatacccatcacactttctcactttatacgacaacgtcattgttttgccatttcctctttatgccgcgatagatctcacactttcccggcgataattcattaatgccgccttttctgtggcgcagatcacctatcccactcgcgtttccacttcgaggtggaaaataactcgctacaaacttttaacccttaccgctagttttatctcattgccattaacggggtgagacgcgtggataacggagcagtaaaacacgatgccggtgagcgaattaacgaactggctgaacaggtgttaacgcaggtggatggcctgctggggcggcatcacattgtccccaatgcggtacagacgcaaatgctgacctcgcacgttcgcgcgatggcgcaccggtcaattaccggcgagcctttaccggaagtcgatgccagcttgtttgatgaaatctcagccgaatcaatggcgctcgcccgcgaaatcgtggcggcgtttggcaaccttcctgacgaagaagcctggctattatcggtacattttgaagtcgcgaaagacaacctctaaggagcaaaaaatggaacagattaccgtcgtgattggcgatcgcctgggtaaaggccagaaagtggcggcaggcgtggaaaaagcgggcggtcgcgcggtcgtcgtgccgggcgtcgcggcagacatgaagctgggcgatgtgatgaaagcggaaaacgccaccttcggcatttcattttgcggcagcggcggcgcgggcgctatcaccgcgcaaaacaagcatggctacaaagccaaatatgggatgcggtcagtagatgaaggcgtcaccgctatcaatgagggctgcaacgtgttgggtttcggctttatggataaagaagagctcggcgagcgcctggtgcaggcgtggcaaaagaaatacggcgcctgatgatgaaagagcaattcaccaccacggtgagagtaaaaggcaagggcgacgccaaagcacgcgcctttgccgatgcgctgaaccatgttcagtcggcggtgatgagagagtcgccgtatatcttactgcgtattgagccacaggatgtgcggattgttcaggcgcatgagtcggtgcgtaaagaggcctttctgtttttctttttgcgccgggaacgacgcacttacagcgtggagctggatgtgaccgtcaacgtgaccgccatcaatctcgacagggtggatttcgtcgcgaaacgctgatttttattaaaaaggcatagttatgttcctgataatactaattaaatcgctcattatcggcgcgctggtcggcgtaggggtgggcgctggggctgcacgcatgtttcacgcgccaaccacgcaggggatgggcgcgttccgtacgttgggcgaactcaactcttgtgaaggcgacccggcatctcacttctcctttgggctgggtttcttctttaacgcctgggcctcgtctgtggcggccggatcgttcacccaggatgtcgatcaccgcatcatccctaactggggcgcggcggcgctaatgatcaaaaaccgtaacgtcggcgagacgctgcacgacccgaaaaaaatggcgatcgcctgcgccgtcatcggcatgatagtcgtgacgttccttaacctgaccgcctcatccgtgccagaagcgctacaggtgacggcggttaaggtgctggtaccggcggcaaacctgctggtcaacatcgtcatgcctgtgatcttctggttagcagcgatcgacgccggtaaaaaatcgggcttctgggccaccgttttcggcggcgcggcgcagctcatcatggggaacgccgtaccggggctggtactgggtattttgatcggtaaaggcgtagaagagagcggctggaaccatgttaccaaagtgatgatggtcgccatcgttttgctgtttgtgttgagcggcttcttccgcggcttcgacatgaaaatgatcgagtctttcaacatgacggtaccgaactggcttgaactgatccacaactcgctcagcggcaaataacggaggccacaatggaagagaataaaggtttttggtatgccgactggtcgttcccgatctttgttggcctgctctcctccggcgttttcgccgggacgcatatgtactatctgtacggcatcggcgcatttaacgaagtcgcttttgtggcgatgttgaaagcggggatggataccggcgtctacggcgcggtcgccgctttcggcgccagctttttatttgcccgcattatcgaaggttcgctggtcggaattctggatatcggcggggcaattcagaccggcgtgggcttaggggttccggcgttactgctgggggctggctttgtcttcccggtggcgaactttatcgcttcgctgataaccggtctggtgattggtctggcgattggctacatcattattctggcgcgtaagttcaccattaatcagagcgactccacgtacggggcggacgtcatgatgggggccggtaacacttcaggccgttttctggggccgttgattatcctcagcgccatgacggcatcgattcctattggtctgggctctctggtgggcgcgctgctgttttatatctggcagaagccgattactggcggcgcgattttaggcgcgatgatcctcggttccatcttcccggttgcgattagctaactgttgatttgtaggccggataaggcggttgcgccgccatccggcaaaggagagaacgatgtttgatttactcctgcgccatgcgcgtctggtcgatgacacgttgactaatattgccctgcaagatggcaaaatcgcggcgttgggtgacgttgatggtccggcgttgaaaaccattgacctgcgcggtgagtgttttgtcagcgcgggttggattgattctcacgttcactgctacccgacatcgccgatttaccacgacgaaccggacagcgtgggtattgccactggcgttaccacagtggtggatgcaggcagcactggcgcagatgatattgacgatttttacaccctgacccgtgacgcgaccaccgacgtttatgcgctgctgaatgtttcacgcgtcggacttattgcccaaaacgagctggctaacatggccaatattgacgctgatgcggttcggcaggcggtaaaacgccatccggattttatcgtcggcctcaaggcgcggatgagcagcagcgtggtaggcgttaacggcatcacgccgctggaacgcgctaaagccatgcagcaagaaaacggcaacctgccgctgatggtacatattggcaataacccgccggatctggacgaaatcgcggagcgtctgacggcgggcgatatcattacccactgttacaacggtaagccgaaccgtattcttcggcctgacggcgagctgcgcgcctcggtgacacgagcgctggcgcgcggcgtgcgtctggatgtcgggcatggtaccgccagcctgagctttgcggtggctaaacgcgctattagcctggggattttaccgcataccatcagttccgatatctactgccgtaaccgcatcaacggcccggtacattcgctggctaatgtgatgtcgaaattcctcgccatcggcatgtcgctgccgcaggtcattgcgtgcgtgacggccaatgccgccgatagcctgaatctgaaaaccaaaggtcgtcttcagcctggtctggatgccgacctgaccctctttacgcttaaacgccagcccaccgtgttggtagacgcggaaaacgacagcttacaggctgaagaattgctgacgccgcttgccgcgatacgcgcaggcaagggctatatgaccgaacaagggagcgcggaacatgccttcgatttttgagaagtatcaattaaaacaggtgattaacgcctccggacgtatgacggcgctcggcgtctctacgccgcgcccggaagtgatagacgcggcgatggccggaatgaatcagtatttcgagatgaaagatctggtgaataaaaccggtgagtacattgcgaaattgctggaggtggaaggggcgacggtagtctcctgcgccagtgcgggccttgcccagtcggttgccgcggtactggttcaggacagcgactggctgctggaaaatctgcacgttacaccgattgaaaataacgaaatcgtcctgccaaagggccacaacgtcaactttggcgcgccggtgggaacgatggtggcgctgggcggcggcaaactggtggaagccggttacgccaacgaatgttccgccgcgcagttggcggcggccattacgccgcgcacggcggctattctctatatcaaatctcaccactgcgtacagaaaagtatgctcagcgtggagcaggctgcggtggtggcgcgcacgcataatctcccgctgattgtggacgcggcggcggaggaagatttgcagtgctactaccgcgtgggcgcagatctcgttatctatagcggcgcgaaagcgattgaagggccgaccagcgggctggtgattggcaaaacgcagtatgttgagtgggtaaaacgtcagtcagcgggcattggccgggcgatgaaggtcggcaaagaaggaattgttggcctgacctgcgccattgaattgtacctgcgggcgcaaaaagagagcggcgcggagatggtagaaaaaatggcgccctttatcgacacgttgaacacgtttaacggcgtcagcgcccgcgtagtgtgggacagcgccggacgcgatatcgcgcgcacggaaattaagtttgatgaagccgttaccggcatcgccacaggcgaactggtcgacgcgctgaagcaaggggaatacgcgatttactttcgcggatacaaagccaacgaagggattattgaagcggatgtccgcagtgtcgatcgcgcgcagttagcgattgtggcgcgtcgtattggcgaggtgattaatcaggagaaacaagcatgaaactgacccctaacttttaccgcgatcgcgtttgcctgaacgtactggccggttcgaaagataacgcccgggaaatctacgcggcggcggaaggtcatgtgctggttggcgtgctctccaaaaactatccggatgtggcaagcgcagtcgcggatatgcgtgaatatgcggcgcttatcgataatgcgctctccgtcggactgggggcaggcgatcctaaccagtcggcgatggtgagcgaaatctcgcgtcaggtacagccgcagcatgtcaaccaggtgtttaccggcgtaggaaccagccgggcgctgctggggcaaaatgagacggtggtgaacggtcttgtctcgccgaccggcacgccggggctggtgaaaatttccaccggcccgctaagcagccgcgcgccggacggcatcgtacccatagaaacggcgattgcgctactcaaagacatgggcggcagctctgttaaatactttccgatgggaggactcacctgtcgcgacgagtataaagcggtagctgaggcctgcgcccgccatgatttctggctggaaccgacgggcggtatcgatctggaaaacttcgccgagattctgcacatcgcccttgatgcaggtgtaagcaaaatcattcctcacatttatagttcgattattgataaggtgagcggcaacacccgtgcggacgatgtgcgtcagttactcgctatcgtccggtcgcgtgtcggctaatcatgaggagagagacgtgcgattccccaaccaacgtttagcgcagctatttgcgatgctgcaaaacgagacgctgccgcaggacgagctggcgcagcggttgtcggtctccacgcgtaccgttcgggcggatatcgccgcgctgaacatgttgctgacgccgcatggcgcgcaatttactctcagccgcggcaacgggtatcagctcaaaattgatgatccggcacgttatcaatccctgcaaacgcagcaatctcccgccctggcgcgcggtccgcgcaccagccaggagcggatacactatttgctggcgcgttttttaacctccgccttctcgctgaagctggaggatttagcagatgaatggtttgtcagccgtgcgacgttgcagaacgacatggcggacgtgcgcgagcatttgctgcgttatcatctgacgctggaaacgcgtccgcgtcatggcatgaaattgtttggcggagagatggcgattcgcgcctgtctgaccgaccttttatggacgctggcgcagcaggagccctctcatccgttaattgttagtaccacgctgaacaccgaggtgtctcaacggctgcggtctcttttgccggatattttctctcattgtcaaatccgcctgaccgatgagggcgagctgtttctgcgtttatactgcgcggtggcggtacggcgtattcgcgaggggtatccgttatcggaatgcgtggcagaggaggtcgatgaaaaggtgcgccatgcggcgcatgagattgcggagctactacaacagctggctgacaagccgctgtcggagccggaagtaagctggctgaaggtgcatattgccgcccgccaggtacaggagattgcccccagcgccattaatgccgatgatgaagaggcgctggtgcactatatcctcaattttattaatacccagtacaactataacctgttgaatgataaacagcttcacgcggacttgctgacccacatcaaaacgatgatcacccgcgtgcgctaccagatcatgatccccaacccactactggaaaatattaagcagcactatccgatggcgtgggatatgacgttggcggcgatatcgagttggggaaaatacacgccgtataccattagcgaaaacgaaatcggttttctggtgctgcatattggcgttgggctggaacgtagttacaacattggctaccagcggcagccgcaggtactgctggtgtgcgatgctggtaatgcgatggtgcggatgattgaagcggtactggcgcggaaatacccgcagattgagattgccctcactctgacactacgcgactatgaggcgcgggacagtattgtggaggattttgtgatttccacggcgcggatcggcgaaaaagataagccggtcatcatgatcgccccctttcctaccgactatcaattggagcagatcggtaagctggtgctggtggacagaacccgtccgtggatgctggataaatatttcgatgcctcgcattttcgcatcgtggagggggaaatagatcaacagacgctgtttaaaacgctgtgcgatcagttgcacgaggaaggctttgttgatgcggcgtttctcgattcggttattgaacgtgaagctatcgtcagtacgttattaggcgacgggattgccttgccgcacgcgctggggctgctggcgaagaaaacggtggtttatacggtgctcgcgccgcaggggattgcctggggtgacgaaacggcgcacgttatttttttactcgccatcagcaaaagtgagtatgaagaggcgatggccatctacgatattttcgtcactttcctgcgcgaacgcgccatgacgcgcctatgcgcatgtcagaattttacgcaatttaaaacggtcgcgatggagtgcgtgagtcgtttttgagaggcgttatccagaattcgatgtaatgcgaatgtaatgctaaactgcattacacattcgattctactggaggcataatggccacgctgaacgtccgtctggatgacaaactcaaaaatgaggcttatgccgtgctggaaaaactgaacattactccaacggaagccgtgcgattactgttccagtacgtcgcggaaacggggcgcatgccagtgaaaaccgtcactcttagcgacagtgaagatgcattgattcagacagttcgggagaggctgtctagtccgcaaaagggaatcaaggttagtctggatgacttatgaactggaattcgacccgagggccttaaaagagtggcataagctgggcgatacggtgaaggctcagcttaagaaaaagttggctgatgtgctattgaaccccagaatcgactctgcccgtttaaacggtcttcctgactgctataaaattaagcttaaatcgtccggttatcgtctggtgtaccaggttcgggatgacgttgtgattgtgtttgttgttgcggtcggcaagcgagaacattcagccgtctatcacgatgcaaacaaacggctttagcgatcaacgcaaatgatgcactacctggttgctgctaccgcgccagataagcgccgggtctttcagatcctgcacaaatttgccatcgaccagcacgttgatgagatcgactacctgcatctgtgcggcgttgagttcatcgagcttgtagccggtccacacccagatatctttccccgggcactccgcgtggatgcgttgtaccagtgccaggatatccggtacgttttgcggatgcagcggatcgccgcccgacagcgagatcccctgacggtgaatgcgcgtgtcgttcagatcggcaatgatcttatcttccatctctttggtaaacggctggccggagttcagccgccaggtgcttttgttatagcagccagggcattcatgcacgcaccctgacacaaacagggtgcagcgggtgccggggccgttaacgatgtctacggggtagtattggtggtagcgcatagcgggtgtccagaaagcatgtaggccggataaggtgcttgcaccgcatccggcaacattgtgatgcctgatgacgacgcgattgcgtcttatcaggcctacggtctttgcaaacggaaattaacctatctgcccattgcctaaatgcttcacgcggcgcttcacttcttcctgcttaccggcgttaaacggacgcgcgtccgggctgcctaaataaccgcacacgcggcgggtgaccgagacgcgcgcggcgtcgtggttgccgcatttcgggcaggtgaaacctttactggtacattcgaactccccggtaaagccgcactcgtagcattcatcgatcggcgtgttggtgccgtaatacggtacatgctgatagctgtaatcccagacatcttccagcgctttcaggttgtgctgaatgttcgggtattcgccgtagcaaatgaaacccccgttcgccagcggcggatacggcgcttcgaaatcgattttgtcgtacgggttgaccttcttctccacgtcgaggtggaagctgttggtgtagtaacctttatcggttacgcccggcaccacgccgaactcggcggtatccagacggcagaagcggtcacagaggttttcacttggcgtgctgtacaggctaaagccgtagccggtctcgtctttccactgatccacggcctggcgcagacgctccacaatcgcgatgcctttagcgcgaagttgctcgctgtcgtacaggtgttcgccgccgaacagcgcgttaatggtttcatggataccaatgtagcccagagagatggacgcacgaccatttttaaagatttcagacacgtcgtcgtccgctttcagccgcacgccgcaggcgccttccatatacaggataggcgcgacgcgggctttcacgccttcaaggcgggcgatacgggtcatcagcgccttccgcgccagcgccagacgttcatccagcagtttccagaatgcggtttcgtcgccttttgcttccagcgcgatgcgcggcaggttaaggctaatcacgcccaggttgttacgcccgtcgtggatctgctcgccgttttcgttctcccacacgccgaggaagctgcggcagcccattggcgttttgaacgaaccggtgactttgaccacctgatcgtagttgaggatgtccggatacatgcgcttgctcgcgcactccagcgccagttgtttaatgtcgtagttcggatcgccaaacttgtggttcaaaccatcgcggatagcgaagaccagtttcgggaacacggcggttttgcgatttttacccagaccggcgatacggttacgcaaaatagacgcctggatcagacgcgactcccaactggtgccgaggccaaaaccaaaggtaacgaaaggcgtctggccgttagcggtgtgcagcgtgttaacttcgtattccagcgactggaaggcgtcgtagcactctttttcggtgcgagaacgcgcatacccttcggcatccgggatctgccactcatcggcggttttgcggtgcttgttgtagctttcggtgacaaacggcgccagcacttcgtcgatacggttaatggtggtgccgccataaatatggctggcgacctgcgcgataatctgcgcggtaacggcagtggcggtagagattgatttcggcggttcgatctcggcgttacccatcttaaagccctgggtcaacatgcctttcaggtcgatcaacatacagttgaacatcgggaagaacggcgaatagtcgagatcgtgatagtggatatcgccgcgctcatgcgcttgtactacgtcacgcggcaacaggtgctggcgggcatagtgtttggcgacaatcccggccagcaaatcgcgctgggtgggaatgactttactgtctttgttggcgttttcattgagcaacgcggagttagtttgctctaccaggccgcgaatttcctggttcagacgaccacgcttttcacgctgaatgtcgcgatcgtgacggtattcgatgtaggcgcgggcaagctgtttgtacgggccggacatcagttggttttcaaccgcagtttggatctcgttaatatccacctgactgcgcgcgttcatttggctgctaacgacttctgcgacggtggcacagtaatctgcgtcatcgactcccgctgctttagctgcacgtagaatggcttccttaatgcgctctgatttgaatggcactttacagccatctcgtttcatcacatgcggtgtcatgatcactccatatttgtaagaacaggttatccacagaggccggggaagccataacaggtttattcatctcttttccaacgacttcccgcaatcctgacccaggttatccacaattcaccttgtgtcgagtgaacaggtgttgtagcaattgtagtcaattaatacaacatattgggtcggtgtgcattttaaagtctatatgtagtgatttgcatcaaggatgtttgcaattttattgatgtagaacaaggtaaaaatcagagcgtacagatggcgggcgctgtagcgtttgtaaaagatagcaagaaaaatctgattaattattcaacaaaaacagtcagtaacctggagcaacgccacagcccgtgtcaataggtttgtggcgtttatccgtataaggatgtcgcgttagcgttgtaaccaccagatggcttcaaatgggcggagcgtcatcgcggctggctggctggcgacctcgccataattatgcagtagcgcctgccactgtcctttgatatgcggcggatgccactcctggcactggttactcagattggcgacaaccagcaggatttgcccctgccactggcggcgataacaccatactgatgggctatccgggaggagatcctgataatcgccccagatcagtacaggctgggttttacgtagcgcaatcagcttttgataggtgtaaaacaccgagttttcatcgcgtaatgccgcctcgacgttaacctccgtatagttatcgcacaggcttatccacggctcgccttgggtgaaaccggcgtttttaccgttgtcccattgcatcggcgtgcggctgttgtcgcgggatttactggccagaatagccagcagttcgtcggggtcgcgcccggcggcgcgtagcgcggcaaacatgttatggctttccacgtcgcgataatcggtgatgcgggtaaagtgtgggttggtcatgccgatttcttcgccctgatagatataaggcgtcccttgcataccgtgcagcgccatcgccaacattttcgcggctggaacccggtattcaccctcgtcgccaaagcgggaaacgatgcgcggctgatcgtgattacaccagaataacgcgttccaggcgacgttatgcatcccctgttgccagtggcggaacaacgctttcagcgccacataatcaggttttgccagcgtccacttttcgccattggggtaatccaccttcagatgatgaaaattgaaggtcatcgagagttcgtcgccgctaagcgcggcatattgctggcagttttccagcgtggtagaggacatttcgcctaccgtcatcagattacgcggcgtaaaaacgtcacggttcatttcgcgtaaaaacgtatgcgcgcgcggcccgtcggtataaaagcggcgtccatcgcccgtcggatcgtcaggaaaattctgatctttggcgatcaggttcaccacgtccagacgcaggccatccacgccgcgatcggcccagaattcgcagacctttttcagctcggcgcgtacggcggggttttcccagttcaggtcggcctgttcaggcgcgaaaaggtgtaaataatattgttcgctctggctatgccagcgccaggcgctgccgccaaatttggattgccagttattcgggcagacatccggcgtgccatcgcgccagatataaaactgacggtatggactctctttgttcagcgcttcgcgaaaccaggcgtgctgggtagaagtatggttaaacaccatatccaggatgatacgaataccgcgtgctttcgcctgcgcgaccagctcgtcaaaatcatccagcgtgccgtaggtcgggtcgatagccgtataatttgcgacgtcataaccgttatccacctgcggcgagatataaaacggcgtgagccagatggcgtccacgccgagtcgctgtagatagtcaaggcgctgcgtgacgccgcgtaaatcgccggtgccgctgccggtcgtgtcctgaaaactttttgggtagatctgataaataacgccgttttgccaccagaggggaatagtcattgttgtttcctgcaagtgcgttgggacgcaactgcgccccgaagaagtattagacaatttgtaatgtgccctgacgatgcttacgctgatagataaaggtggtcagaatcaccgggatcacgatcgcgataaccatcgccatgccgtacacctgccagtagcgcggcggtatagacaggatgcccggcaggccgcccacgccgataccgttggcgatgacgccgttcagaccgcagagcagtcccgccagaccagatccgatcatcgcgcacagcatcggaaaacgatacttcaggttgataccgtacatcgccggttcagttaccccaaggtaagcggaaatggcggcaggaacggagatctcgcgttcattgtgtttacggctggagatgatgatgcccaccacggcggaggcctgcgcgatattcgacagcgcaatcagcggccagactggcgtaccgcccatgctctggatcatctgcatatcgatagcgagcgttgtctggtggacaccggtaatgaccagcggggcatacaggaagccgaacagcgccgcgcctatcggggcgaaactgccggtcatcagataacgtaccgcaaaggccacgccgtcgccgatcatacgaccaaaggggccgataaaggtgtgggcgagaaagacggccagtattaacgaacacaccgggacgacgaccaggtagagataatccggcacgatgcgtttcaaccgcgtttcaataaatccaagcgccagccctgccagtagcgccgggataacctgcgcctggtagcccactttctcaatgctaaataagccgaagttccagacgtccggcgtttgctggcccagcagatacgcattcatcaactgcggcgacaccagcgtcacgccgagcacgataccaagaatcggcgtgccgcccattttttcaccgccgaccagcagattcccaccggcagatagaaaaagatcgcttcgccgatcaaccataaaaaatcataaagcgtttttagcgccggatgcatctgcgccagcgtttggccgttgctcatcggcacatcgccgatcacgttacgaaagcctaagatcaaaccgccgctgatcaacgccggtagtagcggaaagaagatctccgcaaagtgggaaattaactgctcatgccatttcatgttctggcgagcggcttttttggcctgctctttatcagcatacgctttgccggtggtctccagcagcgcgttatagtaatcgccaacgtcggtgccaatcaccacctgaaactgaccagcgttggtgaaacaacctttaaccatcggtaattgttcgatctcttttggcctggcgttcgcgggctggtggagcacaaagcgcaggcgagtaatgcagtggctcaccgtggcgatgttgtcgcgcccgccgaccaggtcaatcagccggtcgatatcggcttgttttactttgctcatcgtaaagcctcatggcagaggagatatgttatgggttggcgcaagagtagctcttcaacgttggtttaaaaatgggaacgttcccgaaacgcagcgacgatcacaaattactcgtggtattccgtttaattagtcactcaggcgagggtagaaggaatgacgatccggcgcggatcgcagcggccattgatctgttcgatcagctgcgaagccgcctgtcgtccggcttcagcatagccaggatcgacagtgacgatctccgggtgcaggaattttatcagcggcgtgttcccgacgcttgccagttgcagcgtctcaatacgttgctcctgtaaatacttactggcgcccaacgccagcgtatcggtggcgcagactaacgcggtggtatccggcatgatgacgcttgccgtatgctcatagccctgcttcatggcaagaccgggcagggcggcgacggggtgaagtttatgttttttgcaaaacgccaggtatgcgtcatgccgacgtttgccggtggtaatatcgctatggggaacgcccagaaagctaatgttgcggtgtccctgctcatacagccgctgcataaggatatgaatcgcgccctcgtcgtcgtaacagacggaggcaaaaccttgcgcatctcttgccagcagcaccagcgaggctttccagggggcgatcaactcttctgtgatgccggtaaagccaaacagcaccacgccatcaatgttacgtcgtctgagcatgcccagatgttccattaccagcgtcggcgagaactgactttccatcataatagggtcgtagccctgttcgtaaaacgcaggcagcatggtctgaaccgcgaggttttcagacaacgaatcaaggcgagtgacgataatagcgaccactttatcgctttgtccccgcatcgcgcgggcggagcgggacggggagaaaccgtgttgattcatcaccgcttcgacacgctcgcgggtacgttcgcttacgccgctttcattgttaagcacgcgggaaacggttgatttccctacgccgctcaggcgggcgatgtctttgatagtgagccggttttgcatcctgttttcccgtggcgtgacgctgatggtgataaaaagagtaactttactcaagcgaagggcaatgggcaaagtctggtttatcgttggtttaattacgtaacggtatgataccgccataattgccacaaaacttatggatttatgcgtataatccgcggcgcaaattatttacttaccggaggcgacatggaccctgaacccacccctctcccgcgatggagaattttccttttccggtaagcctgcctctgctgtcttaccggtgtgtaagacagtgacacaataacgtccctgtttttatttaaacattgctcatcgggcaaggctttgccgtgcctgaagaattttctgcgcctgacttcggcgcggagggattacctatgctaaaaatcattacccgccagctttttgcccggcttaatcgtcatttgccttatcgtctggttcaccgcgatccgctgcccggcgcgcagaccgcggtaaatgcgactatcccgccttcgctgagcgagcgctgtctgaaagtcgcggcaatggagcaggagactctctggcgcgtttttgatacgcacccggagggattaaacgctgccgaggtgacgcgcgcgcgtgaaaagcatggcgaaaaccgccttccggcacagaaaccctcgccgtggtgggtgcatctgtgggtatgttatcgcaatcctttcaacatcttactcacgattcttggcggcatttcttatgccacggaggatctgtttgccgcaggcgttatcgccctgatggtcggtatctcaacgctgctgaattttgtgcaggaagcgcgctcgacaaaagcggcggacgcgctaaaagcgatggtgagcaataccgctaccgtactgcgggttattaatgaaaatggcgaaaatgcctggctggaattacccatcgatcaactggtgcccggcgatattattaagctggcggcgggggatatgatcccggcggatttacggattatccaggcgcgcgatctgtttgtcgcccaggcgtcgctgaccggcgaatctctgccagtcgagaaagtcgccgcgacgcgtgagccccggcaaaataacccgcttgagtgcgacacgctgtgctttatggggacgaacgtcgtgagcggaacggcgcaggccgtggtgatggcgaccggcgccggcacctggtttggtcaattggcggggcgcgtgtcggaacaagataacgagcagaacgctttccagaaaggaattagccgcgtcagtatgttgctgatccgctttatgctggtcatggcgccggtagtactgattattaatggttacacgaaaggtgactggtgggaagcggcgctatttgcgctctcggtcgcggtagggctcaccccggaaatgttgccgatgatcgtcacctccaccctcgcgcgcggggcggtgaagctctcgaaacagaaagttatcgtgaagcaccttgatgcgattcagaacttcggcgcgatggatattctgtgcactgataaaaccggcactctgacgcaggataaaattgtgctggagaatcacacggatatttctggtaagcccagcgagcatgtactgcattgcgcctggctgaacagccattatcagaccggtctaaaaaatttactggatacggcggtcctggagggagtagacgaaaccgccgcgcgtcagctctccggacgctggcagaaaatcgatgagatcccgtttgattttgagcgtcgccggatgtcggtagtggtcgccgaagattcgaacgtgcatcaactggtctgcaaaggcgcgttacaggagatcctgaacgtgtgtactcaggtgcgccacaacggcgatattgtgccgctggacgacaatatgctgcgccgggtgaaacgcgttaccgacacgctgaaccgtcaggggctacgcgtggtcgccgtcgcgaccaaatacctgcctgcgcgtgagggcgattaccaacgtatcgatgagtctgacctcattctggaagggtatatcgcttttctcgatccgccgaaagagaccaccgcgccggcgctgaaagcgctgaaggcgagcggaattacggtgaaaattctcaccggcgacagcgagctggtagcggcgaaagtttgccatgaggttgggctggatgcgggcgatgtcattattggcagtgatattgaagggttaagcgacgacgcgctggcggcgctggccgcccgtacgacgttgtttgcgcgtctgacgccgatgcataaagagcgcatcgtcactttactcaaacgcgaggggcatgtggtcggttttatgggcgacgggattaacgatgctccggcgttgcgggcggcggatattggtatctcggtagatggcgcggtggacatcgcccgtgaagcggccgatattatcctgctggaaaagagcctgatggtgctggaagaaggcgtcattgaaggtcgtcgtactttttctaatatgttgaaatatatcaagatgacggccagctcaaatttcggtaacgtgtttagcgtactggtggcgagcgcctttttgccgttcctgccaatgctgccgctgcacttgctgattcaaaacctactgtacgatgtatcccaggtggcgattccgtttgataatgtcgatgaagaacaaattcaaaagccgcagcgctggaatccggcggatttggggcgctttatggtctttttcggtccgatcagctcgattttcgacattttgaccttttgtctgatgtggtgggtatttcatgcgaatacgccagaaacgcaaactttgttccagtccggctggtttgtggtgggattactgtcgcaaacgctgattgtgcatatgatccgtacccgccgtctgccgtttattcaaagtcgcgccgcttggccgctgatggcgatgacattgttggtgatggtggtgggagtctcgttgccgttttcgccgctggcgtcttacctgcagttgcaggcgctgccgttaagctatttcccgtggctgattgccattctggtgggatatatgacgttaacccagttggtgaaagggttttacagcagacgttatggctggcagtaaacactttcgtcggggattcgccagcgtgcttaatccccgatatcgctaaccaggccagatgcccgtaaagctcgacaagtttaacgcgatcggctttatctttaaatttcagggcttattcaagcaactgtagaatgctatatgcaggcataaaaaagaggaatgtccagctaagtttgtaaaatacattctctgcccccgagccagaacgagaggaggagatgtcccaccgccggatatgttttgcggatatgcgacgaaagcggcgaatatagctaatgcaataaactaagtaaggaggaatcgctaaggcggcagtgggtttaggaaacataagggtaagcaatatggctgcgacaatgaagcataaaaagactatcttcgcggtagattctatctgttttaattcctggcgtatgctttcagcatgtttctcctgccagcgacggagcgtgctgttgctaaatccatattcttcgcacaacgccttattcggtacgccgtttttcgactgttgcagaaaatcggcgatttgttcctcggtaaaacgcgatcttaccattgccgcctctccatggctgttggtgccccgaaccgggcaaacttgcgccgcccggcggggatgacgtccggcgcttagcgacgaacagcgatcgcttcaatctcaattttcacgtctttcggcagacgggcaacttccacgcaggaacgcgccgggaaggtggcgttgtgctcggtgaagaaggcttcgtaggtggcgttgacggtcgcgaaatcgttcaggtctttcacgaatacggtcgttttcacaatgtcgcctactttcaggccagcggcttccacgatagctttaacgttttccagcgactgacgtgcctgagcggatacgtcttccgctacggcaccggttttcggatcgaccgggatctgaccggaagtgattaccatgctacccaggtcaacgccctgtacgtatgggccgattgctgctggtgcattttccgtcgcaatagttttgctcatgatttctcctgaattacagcggtaatagaatgtccccgctcattatagggagccgggatctcataaccaacccaaattagttggccagcaccacataatgcgaaaactctttttcacagtatttgcatttgagggcgatatcattggcgcgttttttcactgcaaagctggaggatactggttccgcgtggctgatgcagttgctgttcgggcaaaccagcacattattaatacgctctggcaggctggggcgtgatttcccgactacgtcgtagttgtcgatgcggttaacggtggcctgcggcgcgtacagagcaagttggttaacctgctcttcggtgagaaaggtgttttctattttgattaagtctttacgccccatctcgccagacgggagattcagaccgatagtgattcgctgatcggtctcggtcaatttaaacagactcagcagtttaaagcctacctgcgcagggatatggtcaatcacggtgccgcatttaatggcttcaacctgcagtttgttatcgtgtgtcatcgtttttctcccttacagactcagttcgctattcagtactaacgccagtaacgcctggcgagcgaaaataccgttgcccgcctgttggaagtaccaggcgtgtggcgttttatccacatccgtggtgatttcatcaatccgcggcagcgggtgcagcactttcatattttcacgcgcgccgttcaggtcgctggcgcgcagaacaaactgcgccttcacattggcgtactccgacgggtcgagacgctctttctgtacgcgagtcatatagaggatgtcgacgtcggccatgacctcttcaatagaaccatgcaggctccaggccatccctttttcatccagcatatccagaatgtactgcggcatcgccagcgcgtccggcgcgataaaataaaaacggttgccgctaaatttcgccagcgcctgggttagcgaatgcacggtgcggccatatttcagatcgccgaccatcgcgatatgcaagttatccagacggccctgcgtttcctggatggtgaacagatccaacagggtctgtgtcggatgctggttcgaaccgtcgcccgcattgagcaccggcacctgaccggaaaactccgtcgccagacgtgccgcgccttcttgcggatggcgcatcacaatcgcgtccacgtaagtgctaatcactgagatcgtgtcggctaacgtttctccttttttccccagcgacgtgttggcgctgtcggagaagcccactacgctggcgcccaggcgatgcattgaagtttcaaacgacaggcgggtacgcgtggaggcttcgaaaaagcagctggcgatcactttatgtttcaaaagctccggctgcgggttggcttttaatttcgccgccgtcgccagtaccagattaagatcgtcgcggctgaggtcgtttatggaaatgatatgtttttgatatagcgggttagccatgtttatctcctgacgcctgggcaaaaaaaaacccctcaattgaggggcttggtattggttttcaacggaaagaaaaacggcaggcctgcgtcttttttcagacgcggtaagacagaatgtcgtacacactgaaccatgcttcctcccggcaaattgtccgcgattatactcagctctgttttgggatcaagcgattaatgcatgatttactcatcgcaaacggttcttatgaatttaaattcattttaagcaaataattaatttgtttgtgtaccagcgccgtgcgctgaacgacccgtggtgcgacccagacaatactgctaccggcaacgacgccgagaatttccggcaatgcgtggtaatccagaattctcgcgacggcgcgaccataacctgccgccgtatggataaggataaattcgctattatgttcaacgctaacgaccatttcggctattgaacgtccggcatccggcgaaggtcgccgctggggatttacggaataaatcttttgtcccttcgtatttctgatttttattgcgcccagcagcttgagcaggcgcgaaaccgtagactggctgataccttcaaatccctcattttgtaaatcgcggcgaatctcctcctgggacaggtaacttttttcactaatcaggcgctgacaaaccgccagttgctgttgttctttggcggagtaatcatcgtattccttcataaatgcaccttatctttattattgatatcaacggactggcgaaattcatcacatttgtcacatcgattgcggatcaatcgggcggttttgcaggaaaatgagaagccgatcaaaaaaggtgacggcgtgcctgatggcgctgtgcttatcagtcctgtcagataagacgcgtcgccatctggctcgttacatcatcgctccgatgctcagtaccgccatattcagcaatgtcaggatcagcaacagcggggcgacccatttcagatagcggacatagggaacccgcgcgatcgccagaccgcccatgaccacggcggaggtgggcgtaaccaggttcacaatcccggaggccgactggtaggcggttacgaccaaatcccgctgtacgtgggcaaaatccgctaacggcgccataatgggcattgtcaatacggcaagaccggaagaggagggcaccaggaaggagagcaatacttccagccagtaggttacgtttatgaaaatagtggtagagaggccggaaaccagactttccgcgctgtgcaaaatggtgtgggtaatcataccgttatccatgaccaccacaatgccgcgcgcgataccaataattagcgccacgccgagtaaatcccgcgcgccgtcaataaaggtactggtgaacgcttcctcacccatccgcgttatcacgccaacgataatcgccgccgccagaaagacgccggagatttccgccatccaccagccgagaaccgccacgccgtaaatcatcaccgcgaaagaggcggcgaagatcatcagcacccatttccgggtagccgtaaactccagcagagtattggctcgattgccgaggaaatgggcgcggttttcctccattttatctgccacgatagaaagctcaggatgggcgcggactttgcgcgcatagcgcattacccaaaacacgcacagtacgtagccgacaattaacagcagtactcgcatcagcattccctgagtaaaagggatgccggcggcgttggcggcaatgaccgtggcgaaagggttaatggtcgaaccgagcgtgcctatccccgcgccgagcagtacggttgccgcggccactaacggatcgaagcgggccgccatcataaccggcaccagcagcgtgtagaagggcaacgactcctccgccatgccatagatagtgccgcctgcggcgaacagcgccatcagaatggggatcatccactcatctttgccgttgagtttgatagttacccgttcaataccggcatcaatcgcccccgttttattcaccacccccagaaagccgccgataatcaagacaaacagcgcgacgtcaatggcgccggcggtgtaggtttcgtggttatagaggccgtcaatcggcgccagtaaaacagcggtaatcccttgcggatgcgcgtccacgggggcatacgttcccgccaccggcacctcttttcccagcgtggcgttcatcgccatttggtattttcccgccggcacaatccaggtcatcactgcgaccagggcaataagaataaacaggatggtataagcggtgggaaatttaaatttacccatgatgttctctcctgatatcacggatatgcgccgcgagggcgcatatcctgtgggattagtcgccgagcgtcgccaccatgactgctttgatggtgtgcatccggttttccgcttcatcgaagactatcgagcctgcggactcgaacacctcttccgtgacctccagtcctttcaggccgtaagccatttcgatttcgcgtcccactttggtgtgctcgttatggaaggcgggcaggcagtgcataaacttcacatcaggattaccggtagcgtttaccacctgctggttgacctgatatggcgtcatcagactgacgcgctccgcccaggcttctttgggttctcccatcgagacccagacgtcggtatagaggaaatccacaccgtgaacgccgtcttcaacgctctccgttaaggtgatacgagcgccggtaacgctggcgatttctcggcactgcgcgaccagcgcggcatcaggccagaaggactttggcgctatcagacggatatccatgcccatcttcgccgcgcccaccatcagcgaattgcccatgttgttgcgcgcgtcgcccaggtaggcgaagctcagttccggcagcgttttgcccggcgcatgttccagcatggtcatcagatcggccaggatctgtgtggggtgaaattcatcggtcaggccgttccagacgggaacgcccgcgtattcccccagctcttccacaatgtgttgaccaaatccgcgatattcgatgccgtcatacatccgccccaggacgcgagcagtatctttcatggactctttatggccgatctgcgagccgcttgggccgagataagtcacctgcgcgccctggtcgaacgcggcgacttcaaacgcgcatcgggtgcgagtagaggttttttcaaaaatcagcgcgatgtttttgccgatcagtgtttgcttttcgcatccggctttttttgcggctttcagctcaatagccagatcgatgaggtgttggatttccgccggggtgtagtcaagcagcttcaaaaagttacgatttttcagtgaaataaccattacaatatccttgttaaaatgaattgcctgatggcgctgcgcttatccggcccacggttatgcgcgctctgtaggccgaataaggcggaagccgccatccggtaaaaagccttatgcgtcaacgtcggcggtttcacaccgaatcaaagtacctttctcgcccgcgagaatggcttgcccatccgccagcgagccgattccggcaatgccgcggcaatggctgacaaactcagcgcaggcggtcactttcgggcccatcgaaccggcgtcgaactgcatttcacgaagcagctccggcgtaacctgcgccagcgggcgttgggtgggcttgccccagtcgagatacaccgcgtcggcatcggtcagaatgagcagcgcgtcggcgtgaatttggctggcaagcagggcggcggacagatctttgtcgatcaccgcctcgataccgtggtagccatcggctttttccacgaccggcacgccgccgccgccgttacagataaccaggtgatcgcggctaatcagcgcgcggatggcatcgttttccacaatgcgtttcggctgcggggagggcacaacgcggcggaaggcgttaccgtcggctttgaatacccagcccttttctgcctgtaacgcacgggcctgcgcttcgtcgtaaatcggtccgatatatttggttggattgaggaatgccgggtcgttggcatcgacttcgacctgggtgagcaggacgctgatttcacgctccggcagatgattcttcagcgcctgttgcagcatgtagccaatcatgccctggctttccgcaccgagaatatcgagcgggtagggtgtaacgttagcgtaggcgctattttgtagcgccagcagtcctacctgtgggccgttgccgtgcactaacaccacgcgccattgccgcgtaagctgggcgatggttctggccgccagttcgatatttttacgctgaatatcagcctccagcggttcgccgcgtttgagcagcgcattgccgcccagcgcgacgaccagtgtgcgtttgttttccataacgtctcctttaaataccatcgcgttccagtggacagctcatgcagcgtgcgcccccgcgcccgcgacccagttcatcgccgggaatgggaaggacggtaatgccggctttgtcgtatttttcgttggtccagatgttgcgctcatagcccaccaccacgcctggacgcagggtgagcacgttattggcgtcattccactgttcgcgctcagcttcaaatgcgtcgccgccagtggtgattaagcgcacctgatcgatgccaagcgctgtttcaagagcatgaaccagcgtgctctcctgggttcgtttcagaccgccgcgtccgtctggcgtcagcgtccagcactgaacgtccgggcgaacgacttccggatagacggagaaggtgtcgatatcaatgtgggtcatgacggtgtcaaggtgcatacaggagcgatgttttggcagttcaacggcaatgacgcgttccgcctgacgatgtttaaacaatgcctgcgccaggaactcgacgccctgcggcgtagtacgttcagacataccgatcaacaccgcgccgcggccaatcaccagcacatcgccgccctctaaagtggcgtggtcgtaattaatgtcctcgtcgccgaaatatttaatgaaatcaccgcctgcgaattgaggatgccagcgataaatggcacgtaaattattcgtttcacgttggcgtgcaggtttcgccatggggttaattgagacgccgttatatatccagcaggacgtgtcacgggtaaataggtgattcggtaatggcttcataataaagtcattaatatcgtgagtatcgaccaccatattttttatggaggcgggaatttcgccgtaagttaaaccgccgcttaaatggcgagccagttcacggtgcggcatatccgccagccaggcgcgaatatctgcggcaaaggtgggcccaaggcgataatcggaaatttgcgtatccagtagccaggctttagcgtcagccacatccagcgtttgggtgagcaggtcggttaacagcaacacttctatcccttgctggcgcagcgtgttggcaaaaatgtcatgctcttcgccagcgcgctctacggataatacatcgtcaaaaagtaattcctgacaatttgaaggggtaagtctttttaggctgagattgggccgatgcaacattacgctgcgtaattgaccgatttcagaaccgacaaaatgcttttccatcattataccttttacataattacaagaataaagaaggagtggctgcaaatatttagcgtgcttgcagtcgcggcgtttcagttaaattcgggagcaatgattgaattttatttgggttgttaatgtgatgagattcacatcaatcaaggagtgctatttttcttacttaatatatgaaccgggtcagagaaattcaaaaaacaataaggcattaaatgaattactacgcagctatatggtttgttatttttctattgttaattatttgtttgctgtattgaatgatatttaaatcttaactcattgaaaataaagtgattatttttaatggttgcataactatgcgtgagggggattttattatcggggatatttaaataatttaaaaataactatggatagagaagtcatttatgcagggagagcgaattgtgatcgctaaaacgtttttatgttaacgcctttaatatcaaagcattgttagtgatggcaatttggcgccgctggggtttatgcataggcactgcataaagttgggcgaactattaacaatatagaaacaccgctggcgataaacatgcgctggcgcaaaatcgatgagagtaagggtagtatggcagccatttttctcgtataaagagaaaaataaaacgctgttttaactaaggggatgcgatgattattggcaatattgaacatctggaggtctggctgccgacggcgttacggcaggcgattgagcacgtcaatgcgcatgtcacgacaacgaccgcgccaggtaagtatgacattgacggcgacaggctgttttatatgatttctgaaaatatgacggagccgggcgaatcgcgcagcgcagagtatcacgctcgttatcttgatattcagattgtgctacaaggtcaggaagggatggcattcagtacccggcctgcgggaacgccgcacacggactggctggcggataaagacattgcatttttaccgacgagcgtcgacgagaaaaccgtcgtcctgaacgaaggcgactttgtggtgttttatcccggcgaagtgcataagcccctgtgcgcggtgggagaaccggcgcgggtacgtaaagcggttgtgaaaatgctgatggcgtaatattttgtgccggatggcggcgcctgcacgttgcgatcttgtaggccaaccgccatccggcatcatcacgacattatttagacagcgtcgctaccattactgctttgatggtatgcattcggttttccgcttcatcaaagacaatgctggccgcagactcaaaaacctcgtcggtcacttccatcccgccatgtaaaccgtactcttcggccatttttttgccgagcgtggtttcgtcatcatggaacgcaggcagacaatgcaggaacttaacctgcggattgccggttaaggccatcatctggctgttgacctgataatcacgcagcagggcaatacgctccgcccatttctctttgggttcgcccatagagacccaaacatcggtatagataaaatccgcgccttttacgcccgaggcgatatcttcggtcagggttatggcgccgccgttctttttcgccatggcgctgcactccgccactaacgcggcttgcggccagcaggcttttggcgcgaccagacggagatccaatcctgttaacgcggcggcttccagcatggagttacccatgttattacgcgcgtcgccggcatagaccaacgtcatctcgttaaaggctttacccggcagatgttcctgcatggtaagcagatccgccagtaattgcgttgggtgatactcatcggttaaaccgttccataccggcacaccggaatattcagccagcgtttcgacgatctcctggccatatcctcgatactgaataccgtcaaacatccggcccaggacgcgggcagtatctttgatggactctttatggccgatctggctcccgctggaacccaggtacgtcacgcgcgccccctgatcgtatgcggcaacttcgaaagagcatcgtgtccgggtcgagtctttttcgaagatgagcgcaatattcttacccaccagcttttgttcttctttaccgtttttcttatcggctttcagtttggcggcaagctgcaacagagcagtgagctcgctggcggtgaaatcaagtaactttaaaaaaggtttttggtaaaacgtagacatacttccctcacatggcttaggcctctcattgaattaaaattcactttatatggatgattattcatttgcaactctgtttgataaaacttttctcgataaggtggaggcaacgtcggcggtatgtgacaataagagtatcggcaggacatctatgaggaacgagctatggcaaacccggaattactggaagagcagcgtgaagaaacgcgcttaattattgaagagttacttgaggacggcagcgatccggatgcgctgtacactatcgagcatcacctttccgctgacgatttcgaaacgttggaaaaagccgcggtagaagcctttaaactcggctatgaagtgacggagccggaagagctggaagtggaagagggcgatacggttatttgttgcgacatcctcagcgagtgcgcgttgaacgccgaactcatcgacgctcaggttgagcaactgatgaacctggcggaaaaatatgatgttgaatacgacggctggggaacctatttcgaagaccctaatggcgaagagggtgatgacgacgattatgtcgatgaagatgacgacggcgtgcgtcactaaagctgcatagtatgacggtacggcagcgtctgctgtcgtatttttttaacaggttacgtatgaattacccgcaaatactctctccggtgcttaatttcctgcattgcccgacgccgcaggcgtggattgtccaggcccgcgatccgcaaaatcttcctcttctgcttaccgatcacctgatctgcgaactgaaggctgcgcaaaccgcgttgctgttggtgcgtaaatatgtcgccgataaatcgggcgccgacgcgctgctctcctggctgcaaccttacgaggcgttcgcgtttcgtcaggggccggagccggattttgttgccctgcataaacagattagcaaaagcgccatgccgcaaactgatgacccctggggacgtcagcttatcgaccgtatggtgttattgattaaagaggagttgcaccatttttggcaggtacgcgaggtcatgcaggccagaaacattccttatgtgaaaatcaccgccagccgctacgcgaaaggaatgttgaaagcggtacgcacgcacgaaccgctcaccttaattgataagctgatttgcggggcgtatatcgaagcccgctcctgcgaacgttttgccgctctggcgccctggctggatgaggatttacagacgttttatctctcgcttctgcgctccgaagcacggcattatcaggattacctggcgctggcgcagcagatttccgccgaggacatttctgcgcgcgtgcgctattttggcgaggtagaagctgaccttatcttgtcgccagaccgcgagtttcgttttcatagcggcgtgccagccgccggataaagggtaaaattaaagattagcgtttttatcttttacgctgtcgccacctgcgtggtcatccgcccgacatcaaactgctggcgagcagaaaaagtcattttcatgatattctgtcctgagtaaagcctgccctgcggcaggcaaaaagaactcactcagtgttatattcccgaaaggtgaccgtgaacaatgccatttttgcatcatcactacgggttcttgtgttgaaatacttactgtttcacgccttttgacgcttcagagcaggtcttgccaacaaaggtttgtttaattttgttgatggaggttgttttattacctcctgcatcgacatccgatttcatggtcatcgcaaattctgtatcgcttattttcgtcgtttctacaatagagtgcgatttgacatcaggattattacagacagtctcattgatcagtttggtatccgtactttctacaaatgttgtcgtgcaaccgcctgcactggtagaaaaacccttcaccatttttttagaatcttcagacattttaggggtataacacataagcgtcgctatgcccgaatttttttcatccattaatacttcttttgtatctggattgatggtgcgcatttctatattttccattttccattcgccgggctgtatatctaatgcatatacattagagatactaataaacatagcggggaaaacaattgctgataataggcgtttcatttataacttccttgaataataagtgattcccggataacaggatgtttccgggattatttatatcagcaaaaataatacctggcgaggataaataaacgcctggttttcagagatcctttaacatcctcacttcgcaatcgacatgtccggtgcagccgagcggttcgctaatatgttcaaatcctaaacgttcgtatagcgcaatcgcctcgcgtaaaaaagccgttgtttccagatagcagcgtttaaaaccctgttcacgggcatgatccagcgccatcagcgccagctttttcgccagcccctggccacgaatcaccggtaaaaaatacattttttgcagttcacaaatgtctggttcgctacaggataacggcgccacgccgccgccgcccaccacacaaccgttttgctctaccacccagtaggccgcgcccggttggctataaacctgatacagttcatccagattggggtcggcaacggtataacctttatcggcggtaagtccgtattccgctgaaacctgacggatgacacgggcaatagcggcattgtcggcggtagtgattcggcgcaccgtgagcgttggcgaggcgacattattcataatatggctcaatttttaaaatttatttatagattactttaataccaccgtcttgagttacgcgcaaggagatcctgaatcagacaaaataaaaggcggaaaaattaaacaaaaatagtatcgtagtcaaatcagtaacagtttactggtttttattattaattctaatagattgtaattcagggatatgattcatgaataacgttatcagtagtaaagataaccataatcacacgttggtgtttacaggcaagggcggaaagtattttgttatttgccttgtgaatttcttgttgacgtgtatcacgttgggaatctatgcgccgtgggcgatggtgaaatgtcgacgttatatttatactaacatgacgctaaacaatcagccttttgcttacaaagccacgggcggcgcattatttattagtgtgttgttagtttttattatttatattgttagcctctctcttattgaacacggtcatcccggtctcggttttacgctattcggcttattaattgcgattattccttttatggcggtgaaaggattacagtatcaggcgatgatgacttcgcttaatggcgtacattttggattccagtgttccatgcggcgcgcctggtggtacatgttcgctcttcctgtactcctgatggtggcgctttatattgttctttatattatctcactggtaaccatcgccgtcggcggtttagtgttcagtatcgtttttctcggtttgctggctattattgggataggggtcattaacggtattacctacagcaaatggatgaccttgtttggtaatggcgcaaactttggcattcatcgtttctcgattcaggttaatgttaaaacgtgcatcagagggtgcgtgttggcaatgttgacccttttcccttttgctgtcgtgattggttatctaatcgcgccggtgttcaccgacatgattcttttgagtatgatggggaatgcgcaggcaggaggggcgcttattctgcaatattatggccagataatggcatgttatttcctctattttctcgcgattattgtggtaaccagttacttatatgtggcgttacgcaacctgtttttaaacaatttgtcactggcgaacgattcgattcgttttcattcctctgtcactgcacacggtatgctgtggcggttactggtggtgtttgtgatttccggcgtgaccttagggctggcttatccgtggttgaaaatttggctggtgagctggctggcgcagaatacacaggtccagggcgatctggattcgcttgagttaaccaatgatgagaagccgctggaaaacagcccgctaatgtggatttctcgtggcattatgccttacttcccgtttatctgatgtaaaaaggccgacgtttacgtcggcccataattcatgttgtcggatggcggcgtgaatgccttatccggcctaccgatcgcgccatgtcaataagcgaacgtgtaggcctggtaagcgaagcgccatcaggctttcagattacagcgcgctaataaccgcctgctgctcaatcagtttcgctttggcttctgcgtaaccgtccagcttctcacgctctttggcaatcaccgcttccggcgcacgggcgacgaaaccttcgttggacagtttgccttcgatacgggcaatctcgccttcgattttcgccacttctttcgccagacgcgccagctcatcgtctttgttgatgaggcctgccatcgggatcagcagttcggcgccgtcgatgattttggtcacggaaaccggacctttgtcatcggctggcagcacggtgatgctttccagacgcgccagggtttgcaggaagctacggttgtcgttaacacgacgaacggcttcttcactacagccgcgcagcagcagttccagcggtttgcccggggcgatgttcatttccgcacgaatgttacgtaccgcgacgatcgcctgcttcagccactcggtatcggccagcgcggcttcatccacctgtgcggcgttatattccgggaacggctgcagcataatggtatcggcggtaatgccacagataaccttcacgcgctgccagatggtttcggtgatgaacggaatgatcggatgcgccaggcgcagcagaccttccagtacggtgaccagcgtatggcgggtgccacgcagttcagactcggaacccccggtcattaccggcttggtcagctccagataccagtcgcagaactggttccaggtgaactcgtacaggatgcccgcggcgatatcgaagcggaagctgtccagcgcgtcgcggtacgctttaacggtctggttgaattccgccaggatccaacggtcagccagcgacagcgtcatttcgccgccgttgaagccgcaatcctgctcttcggtgttcatcagcacaaagcggctggcgttccacagcttgttacagaagttacggtaaccttccagacgcttcatatcccagttgatgtcgcggccggtcgaggccagcgccgccagggtaaagcgcagggcgtcggtgccgtgcggctcaatgccgttcgggaactgcttctcggtacgcttgcgaattttctccgccatctgcggctgcatcatgttgccggtgcgtttttccagcagttccggcagggagatgccgtccaccatatccagcgggtcgataacgttacccttggatttggacatcttctggccttcgtcgtcgcgaatcagaccggtcatgtagacggtatggaacggcacctgcggcttgccgttttcatctttgatgaagtgcatggtcatcatgatcatgcgggcaatccagaagaagatgatatcgaagccggacaccatcacgctggtggggtggaactgacgcagggcgtcggtgttttccggccagccgagggtggagaaagtccacagcgcggaggagaaccaggtatcgagaacgtcttcgtcctgacgaagcgcaacgtcggcgccgaggttattttcctgacgcacttcgtcttcggtacggccaacgtagacgttgccgtcgttgtcataccatgccgggatacggtgaccccaccacagctgacgagagatacaccagtcctgaatatcgcgcatccaggagaagtacatgttttcgtactgcttcggcacgaactgaatgtcgccgttctcaaccgcttccaccgccggtttcgccagcacgtcagcacggacgtaccactggtcggtcagcatcggttcgataaccacgccgccacggtcgccgtaagggacagtcagatcgtgcggtttaatttcttccagcaggcccagcgcgtcaacggcagcaacgactgctttacgggcagcaaagcgttccagcttctggaactcagccggaatctcgctggaataaacgtcagactcttcacctttggtatcgaacacttccgcgctttcgcggatgtcgccgtcaaaggtcaggatgttgatcatcggcagggcatgacgtttcccgacctcatagtcgttaaagtcgtgcgccggggtgatcttcacgcagccggtgcctttttccatatcggcgtgttcgtcgccaacaatcggaatgcggcggttaaccagcggcagaataacgaatttaccgataagactctggtagcgcggatcttccgggttcacggccacgccggtatcgccgagaatagtttccgggcgggtggtggcgacaaccagataatctttaccgtctgcggttttcgcgccgtcggccagcggatagcggatgtgccacatcgagcctttggactcgcggttttccacttccaggtcagagatggcggtgcgcagtttcgggtcccagttcaccaggcgtttgccacggtaaatcaggtcttctttgtacaggcgaacaaagacttctttcacggcattggaaaggccttcgtccatggtgaagcgctcgcgctcccagtcaacggagttgccgagacggcgcatttggcgggtaatggtgccgccggattccgctttccactgccagattttgtcgataaacgcatcgcggccgtagtcgtgacgggttttaccttcttcagcggcaatcttgcgctcaaccaccatctgggtggcgatcccggcgtggtcggtgccgacctgccacagggtgtttttaccctgcatacgctggtaacggatcatggtatccatgatggtttgctggaaagcatgtcccatatgcaaactgccggtgacgttcggcggcgggatcatgatgcagaaggactctttgctttcgtcgccgttaggcttgaaatagccctgcttttcccagtgctcgtaaagcggctgttcgatatcttgggggttatatgtcttttccattatttccaggttgccgtattcaggttaaaaccagccacgcggtaggctttgtagcgttcgcgcgccagttgtttcaaagtttcttcgtaagggacgaagtctaccacttctgtgaaagcggtggcaaaatctgcaaagcttgtacgcaggctgattaaaatatcgcgcgggctgctgttgcgtttttgcggccaggcgatttcaaccggcgcgccgccgcgtgggccttcgcctgccagattgtgcgggacaaaactttccgccggtcttgcccacagcgcttcatccagccgaatggcctgcttctcatcttcgcaggcgatcagcacgcgcttgcccgcgcgccaacgttctgcggcaatttcacacaccagttgttcaacggcgcttaaaccgttgacggtggtgtcattatccagaagatagaacgtcgcatttttcatatatggggcttcttgtggtggatttaaatgcgttgtcatgatgcctcccgtaggccggataagcgcagcgccatccggcaaaacgcctgatggcggcgctaatgcgccttatcaggcctacggggtaatctcaaacttactcttcgccgttaaagcccgcacgattgagcaggaactgcgacagcagcgctaccggacgacccgtcgcgcctttcgctttgccggaacgccaggcggtaccggcgatatccaggtgcgcccagttgtacttacgggtaaagcgcgacaggaagcagcccgcggtgatagcgccgccaggacgaccaccaatgttcgccatatccgcaaagttggactccagttgttcctggaactcatcgcccagcggcagacgccacgcgcggtcgcccgcttgctcggacgcgccgatcagttcatgcgccagcgggttatggttcgacatcagaccggtaatgtgatggcccagcgcaatcacgcaggcgccggttagcgtcgcgacgtcaatgaccgcttccggttcgaagcgctcaacgtaggtcagcacgtcgcacaaaaccagacggccttcggcatcggtattcagcacttcaaccgtctgaccggacatggtggtcagcacgtcgcccggacgatacgcgcgtccgcccggcatgttttcacagcccgccagtacgccgataacgttaatcggaagctgaagctcggcgaccatacgcatcacgccgtaaaccgccgccgcgccgcacatgtcgtacttcatctcgtccatcccttcagatggcttgatggagatgccgccggagtcgaaggtcaggcccttacccaccagcacgatcgggcgcgcgtcttcggacggattgcccttgtactcaatcaccgacatcagcgattcattctgcgaaccgtggccgaccgccagataagcgttcatacccagttcgcgcatttgctgttcgccgatcacgcgggtaatgacatttttgctgtagctgtcggccaactggcgcgcctgtgacgccaggtaggcggcgttacagatattgggcggcatgttgccgagatctttcgcagccttaatcccggcggcgatggccagaccgtgctgaatggcgcgttcgccgctggtgagctcacggcgggtcggcacattaaagaccatcttacgtagcgggcggcgcggctcgctcttgttggtcttgagttgatcaaagctataaagcgtctctttggccgtttcgacggcctgacgcactttccagtagttgttgcggcctttgacgtgcagttcggtcaggaaacagacggcttccatcgaaccggtatcattcagagtatttatcgttttctgaataacctgcttatactgacgttcatcaagctcgcgctctttgccgcaaccaatgaggaggattcgctcggaaagaacgttaggaacatggtgcagcaacagagtctgccccggttttccttccagttcgccgcgacgcagcaatgcgctgatgtatccgtcgctaattttgtcgagctgttctgcaatcggagaaaggcgacgcggttcaaagacgcccacgacaatgcaggcactccgctgtttctccgggctaccgctttttacactgaactccatgcactatgctcctgaatcttaaagacaacagtggtggctacagctatactcgtcgtctttcaagttgcagatgcgttggctgcgcctgctcacccctgtcgcttacctgatgtaagctccggggcttcacagtcttgccgcctgcctgcaactcgaaatccattagagtatagaaattgaaagctttcgtaactcatatccgctgttgcggtgacttcgtgttaatcttaacgttattacggcattggcacgtcagaacaagttctgagaggtgaatccgctgagtataatgatcttagcgatgatttcgacgactcaagagaataaatgacgtttaagccatgaaacaagctaaattccagcaaaaaaatgggtttttacgggcgtatttaaagtgataatcataagatatctggtgcgggagacgctcaaaagccagctggcgatactcttcatcttacttttgatcttcttttgtcaaaagttagtgaggattctcggcgcggcggttgacggcgatattcccgcaaatctggtgctctcgcttctggggctgggcgtaccggaaatggcgcagctcatcctgcctttaagcctgttcctggggctgctgatgacgctgggcaaactgtataccgaaagtgaaattacggtcatgcacgcctgtgggttgagcaaagccgtgctggtaaaggccgccatggtactggcgttatttaccggtatccttgcggcggttaacgtgatgtgggccggcccctggtcgtcaaaacaccaggatgaagtactggcggaggcgaaagcgaaccccggtatggcggcgttggcgcagggacaattccagcaggcgaccaacggcaactcggtgctgttcatcgaaagcgttgacggcagcgacttccacgatgttttcctggcgcaaattcgccctaagggcaatgctcgtccttctgtagtcgtggccgattccggacaccttactcagttgcgcgatggttcccaggttgtcaccttaaacaaagggacgcgttttgaagggacggcgttgctacgcgattttcgcatcaccgacttccagaactatcaggcaattattggccatcaggccgtggcgctggacccgaacgatactgaccagatggacatgcgcacgctgtggaataccgacaacgatcgcgctcgcgccgagctgcactggcgtatcacgttagtctttaccgtatttatgatggcgctgatggtcgtgccgctcagcgtggtgaatccacgtcaggggcgtgtcttgtctatgttgcccgccatgctgctttatctgctgttcttcctgatccagacctccattaaatcgaatggcggtaaaggcaaactggacccggttatctggatgtgggcggtcaacctgatctatctggcgttggcgattggtttaaacctgtgggatacggtgccggtccgccgcctgcgtgcccgttttctgcgtaaaggagcggtataatgcagccatttggtgtacttgaccgctatatcggtaaaaccatttttaccaccatcatgatgacgttgttcatgctggtgtcgctctccgggatcatcaagtttgtcgatcagctgaaaaaagcggggcagggtaactacgacgcgctgggcgcgggtatgtacaccctgctcagcgtacctaaggatatccagatcttctttcctatggcggcgctgcttggcgcgctgctgggactggggatgctggcgcagcgtagcgaactggtggtgatgcaggcatcgggtttcacccgtatgcaggtggcgctgtcggtgatgaaaacggctatccccctggtgctgttaaccatggcgatcggcgaatgggtcgccccgcagggcgagcagatggcgcgtaactatcgtgcgcaggcgatgtatggcggttcgctgctttccacccagcaaggtctgtgggcgaaagacgggaataactttgtctatattgaacgggtgaagggcgacgaggagctggccggcattagtatttacgctttcaacgatcagcgtcgtttgcagtcagtgcgttacgccgcttcggcaaaattcgacccggagcataaggtctggcgtttgtcgcaggtggatgagtccgatctgcaaaacccgaaacagatcaccggttcgcagacggtgagcggcacctggaaaacgaatctgacgccggataagttaggcgtggtggcgctggacccggatgcgctttccatcagcggtctgcataactacgttaaatatctgaagtcgagcggacaggacgccggacgttatcagctcaatatgtggagtaaaatcttccagccgctctccgtggcggtgatgatgctgatggcgctgtcgtttatctttggaccgctgcgtagtgtgccgatgggcgtgcgcgtggtgacggggattagcttcggcttcgtcttttacgttctcgaccagatttttggcccgctgacgctggtatacggcattccgccgattgtcggcgcgctgctgccgagcgcgtctttcttcctgattagcctctggctaatgctgcgtaagtcgtaatcacagtaatcgtaggcctgatggcgctgcgcttatcaggcctaccatgacccgtaggcctgataagtcctttccgccgccatccggcagaccgcctggtattcctcgaatgatgtagtgcgtaacctgacgcgtggcgcttttggctacgcgttaagctcaggcaagctgcgggaaaaagtagaacaaaaaatttataacgtgctgccgtgataaatctgataacccaaatcaatcgtattatggttgagatcgttatttttaattttgttgagcaacatctgcgcggctctgcgcccgatctcaaaacgaggggtaattacgctggcgaggctcggtatcatttgcctgcccatctccagaccgtggaagccggcgatggagatctgctccggtacggccagttgacgctcgcggcaccacagtagagcgcccattgcgatatcgtcatttgtacaaaagacgccatccacgtccgggtgcgcagtaagcgcatcacgcattagctgtatccccagatggatagaggagatagcgcgtggattgatgcgcaacggcgccagcccccggcgcgtcatcgcatcgcagtagccgtgataacgctgctcatctcggatatcgtcttttgaacccagatagaggatttttcgccgctggcgtttatccagcatggtgctgaccatatcaaaggcggcctgacggttatcaaaccccacctccatatctaagcgatcgccctggatgtccatgagttctacaatcggaagggtagctgagcgcaggaatttgacggttctgagggtatgatatttttctgaaagaataatgccgtcgatattgtaagacagtaaattgataacggactcttcttccgaatcgcgattgtaattgtaattcgcaatgagagtttggtagttatgacccgacgttacggattcaatcccggcaagaatgtcggcaaacaactggttctggaaagaggggatcagcacgcccagagtgtaactttgcgcgtttaacagcatagctggcgcgcgatttggtatgtagttaatttcctccatgatctgcgcaatacgctcgccggtttccctggcgacttttttcggcgagcggatgtaacggctcaccgtcatttttgtcacgccagcaagcgtagcgatatcctgcaaagaaattctgtgattcctcatgttttctccagtaccggaggcgggaacgtcgcccccatggttaattgggctgcggatgatgaattaatgcagaaccgcattcagcgccagtacgcccagcaaccccatgacagaaatcaatgtttccataacggtccaggtgcgtagggtttccccgacgctaagattaaaataccctttaaacagccaaaaaccgggatcgttaacatgtgatgcaataacgcttcccgcgcctgtcgccagtaccattaacgccggatcggcgtgggttacgttaataatcggcaatacgacgcccgctgtggttatcgcagccacggtcgcggaacctagcgcaatacgcagcacggcggctaccgtccagcacattaataacggagatagcgaggtgccggtcattaattgcgagatatattgacccacgccgctatccaccagcacttgcttaaacgcgccgccgcccgcgatgataaaaacaatcatcgcaatagcgccaatggactcgccgacgatatccatcacctgctcaaccgtacgtccgttgcgtcggcccagcgtaaaaatggcgatgataatggcaataaacaacgccactgctggattaccgataaattcgaagaaaacccgcacggcattcgtttttggcagcgtgatttcacataccgctgcgatggccatcagaatgaccgggatcacggcggcaaaaatactgttccagaatgacggcatctcctcttcactgaataggtgaggattaaataatccttcaggcggcgctttctcaaagcgcgccagcaattttgaaaacagagggccggcaacaatcacggtcggtatggtaatgattaacccatacagcagggtcgtaccgagatttgcctcaaaaattgtcgcaatagcagtagggccgggatgcggcggcaggaagcagtgcgtaacggataaggcggcgaccattggaaccccgacatacagcaagggcagtcccgatgaggccacaatcgtaaaaacgagcggcaacagcagtacgaatccgacttcaaaaaacattgccaggccgacgataagcccggtgatcaccagcgcccattgcacgcgttttttgccgaacgtattaatgagcgtcgtcgcaatgcgctgcgcggcgccggtatcggaaattaatcttcccagcatcgcgccaaaaccgaggatcatggcgagtccgcccagagtaccgccaattccgttttgtatggagtgcaggacgtcttgcgcgcccatcccttcggcaaatcccaccacggcggcaaccagaacaagggcgataaagccgttaactttaaagccaatcattaaaaccaacagcagcgcaacgcctgccgcaataattattaatggcatattcgtctctcttattagcgccaaaatagcagcgcttacgcgctgcgtcgtatttccctggtcagacggcaaccagcataccgccatcgacaaacagcagatgtccgttaacaaagtcggaggcttttgacgagagaaacaccgctgcgccaataagctcctggggatcgccccagcgtgcggcaggcgtacgtttgcatagccaggaggtgaaggcttcatcttcaaccagcgctttggtcatctccgttttgaagtaccccggcgcaataccgttgacctggatattatgacgcgccagctccacgcacatgccgcgagtcagcatcttcacggcacccttcgacgcggcgtatggcgtaatcgtgtcgcggcccagctcgctttgcatcgaacagatgttgatcacttttcctgcctgccgcgccaccatacggcgcgtaacggcctgagagacgagaaaaaccgcggtctgatttacggcgatgacgtcattccactcctgttcgggaaactcagtaaacggatgacggcgctggataccggcgttatttatcaggacgtcaatgacgccgatatctttttcgatatgttcaaccgcagcttcaatatcctgtttatgggtgacattaaaaggagcggcaatagcctttatcccttcctgctgaagtttcgtcacggctgtttcggcgcgctccggggtgatatcgttaacaataatgcgcgcgccatagcgaccaagaccggtcgccagcaaataaccaattccctgagcggctccggtgataaggatatttttacctgccagtgaaaaaagatcgttcatgatagtgtcccttattttactttctcagaaaacgagctgaacttttgccgcctgtgttttgtctccggcaaagatcagcgccgcttccaggtcggtaaatggatattccgcgctcagtaacggcagcggattgataacgcggttggcaagccaggaaaccgcagtattaaattcggtagtaaagcggaaagagcctttcagggagatctctttgcttattaccatcatcatcgggaagttgggaactgcgccgcccatgccaacctgcaccatcacgcctttggcccgtgtgacttccagacacgttgagatagaggaaggatgcccagagacttcaaaactgatatcgaaataccctttttctgctttccagtcatcgagagaatcatgctgtgggttcaccagcgtatccgcgcccatctgccgggccagcgagagagaacgggtactgatatcggcacataccacttccgccgcgcccagcgtttttaccgcgctaacaatcaggcagccgatagggccaacgccggagataaagatgcgtttgccctgcagatcgcccgcctcatgagctgcatgaatggcaaccgccagcggctcggcaaaggccatggctttttcgtccgcctgttccggccagggaatgcactgagcggtatcgacagctttaaatcgggtaaaaccgccatcgacatgcggaaaatacatggcgctgccaaagaaacgcatttcagtacagtggttttcttcatgctgcagacagtatttgcaatgaccgcaaggctccgatggattaattgctaccggttgtccttcacgtaataaatctgagtcgctatgaacgattttgccaatcacttcatgacctaaaatcattggcgcttttactgtaaaattgccgactttgccttcctgataataatgtaagtcagacccacaaatgccgccacgggtaatttgtacgagagttcctttattattccattcaatattttgttccgtaacggcaacagcacgcttacccgcaacaacgcaggattgagtttttacttccataaattcctcactggtcaggtagttaccctgaacgcatttaagcggttttatttgtcactatttgtgacttatgtcacgctggaaaattgttacactacaatgttacgcataacgtgatgtgccttagagttcttctctatggaaattaaaaaacgtgaaattgtcgaacgtagaggcgtaatattgtgttgtggaatatgactcagaggtatttaaatggccggggaaagctatattttaatgggtgtttcaggtagtggtaagtctttaataggcagcaaaattgcaacattattttctgcgaagtttattgacggcgatgatctccatccggcgaaaaacattgataaaatgtctcagggaataccgttaactgatgaagaccgcttaccctggctggaacgattaaatgacgcttcatacagtctttataaaaaaaatgagacgggatttattgtttgctcgtcattaaaaaaacagtaccgcgatattttacgtaagagtagccctaacgtacatttcctgtggctggatggcgattacgctactattctgcagcgaatgcagcgtcgtgccgggcattttatgccgccagacctgctgcaaagtcagtttgatgcgctggagcgaccctgtgccgatgaacatgatattgcgcgtatcgatgttaatcatgacatcgagcacgtgacggagcagtgccgactggctgtacaggcttttcgtcaggcactcagcgcttcctgatcattgtcaaagcgctgagtcaggcggtcagaagtcagcttttagcactacacgatagcgggctttgccgtcgcgaacgtgctggatagcctcgttgatttgtgacattgcgaacagttccgtggtgggcgcgactttactgcgtccggcgaatttcatcagtttgcgaagttcatatggcgttccggttgccgagcctgagatactgcgatcgccggcaattaatgtaaacgccggtacgggcagcggcttcaataccgccccaacggtatggaagttgccgccataggtcagcgcttcgaagtagggttgccagtcgagatcgacgttaaccgtgttaataatgagatcgaactgacccgccagtgcttttaacgcttccggatcgcggctgttcaccacgttattggcccccatcgccagcacttcctgctccttcgatggatttgagctgaacgcggtgacttcgcagcccatcgcgtgtaacagctttatggcgatatgccccagcccgccaataccgatgacgccaacgcggctggtagcagtaatatggtgcatcaatagcggtttaaagaccgtaatgccgccacataacagcgggcctgcggacgccatatctatattctccggaagaggaattacccactgccagcctgcgcgaagcttctcggcaaaaccgccacgattgaggatagtgggcactgcgccttcctggcagttaatttgattgccgctgatacaggcatcgcagtgtccgcagctgcgcgccgtccagccgattccaacgcgctggccgacttttagccccttatcctgtgccgcgctgccgagtgcggccacccgaccgatgacctcatgtccggcaaccagagggtattgagagaacccccattcattgtcgatcattgacagatcggaatggcagatcccgcagtagtcgacccgtacctcgacatcttccggttggagttctcccgcgtcatattcatagagttcgagctcgccgcccgcctctttggcggcatagctttttattatcgtcattgtgtttcccttaatgtggtgttgaactgaaaagtgtagagcatggaggcaagggacgcccggcgttaatctgctggagaaggcgggaagtagcctgattattctatttaatactcaacgctgctgaaattttcagcacttagcgatacaggtgtatgctcgtgcttgcatggtggcgtatgacaggtataatccacaacgttttccgcatacctcttcagtgccgaagtggcgaaatcggtagacgcagttgattcaaaatcaaccgtagaaatacgtgccggttcgagtccggccttcggcaccaagtgatgcaataattagctgcctaatggtggctttttttgtgtccatttccgtccaaattcgtccatatccatctgtaattcaaagataatttatttttctgtaatagaaatatttattttgtggtctttccgtgttggtcgtttttcatccattaacatccacgcgatctgggggcaaaaaggggcaaacccggttcgatagaggagtgccccccaaatggcgcttacagatctcgcaatccggcatgccaggctgcctggcaaggcatacaggctctttgactgccacggtttttacattcaggtgaaccccagcggatccaagctgtggtatctgaaatttcgctttggaaacaaaaagaaccgtatggcattaggcccttatccgctcatttctcttgcactggcaagggagaagcaagcggatataagaaggcttattttagaaggtattaatccggcggaaaaacgcagagaggacaagcggggtggcgagcctctttaatacgttcgagtccgtagtgcgcaaatgcgtctccagcaacgtgaactggtcgacggaacattcgacagcgttattttctgagcttacaggttttccaatattgcactgaacgctatccagtcgggttcacgggcttctggagcgagctgcgcagccgataatcctctactgcttcagttataacgctattatgtgacatgcagcatgatatggtcgttttctgaactccgtataacctgagtatttgtattgaagcgtgaacaaaacattgcagccagcctttcaacgtggacaatagttattcatacggtgattttatattcgataaatcaatgggtttcattgaaacataggactggtaatggatgacaatgctttagggtttgcctcatactggcgcaattcgctggcagatgctgagtcaggaaagggcagttttgaacgcaaagacgccaaaaatttcacccactggcatgggatagcggcgggacgtcttgacgaaacgatcgttggtaaattttttgagggagaaaaagacgacgtcgaaacagtcgatgtcatcttgcggccaaaggtttatttccggttactgcagcgtggaaaggaccattccgctggtgcgcctgatattgttaccccgatagtgacgccagccctattgagccgtgaaggttttttatatccgacgccagcgacctccattcccagagacctgcttgaacctttgccaaaaggggcattttcaattggtgagattgagcagtacgacaaatacaaaacgacacatacgtcattctctatcaactttgatgaccgcgttgataagaccgccgaaacagatgaagaacgagaagcacgatatgcagcctggcagcaggattggcgtcaatatctggatgattcagaaaggctgctgaagaacgttgtcggcgactggattaaaaatcctgagcaatatgaactcgctgagcacggttatattgttaaaacggcgcaatctggcggcgccagtttccatatcctttcactttatgatcacctgcttgtttgcaaaaaggatgtgccgctcttcaatcgtttcgcctcgcgagaggttcatgctgcagagtcattacttcctccggaagcaaaattcagcgacaggattggacactccggggataagtttccgctggcaaaggctcagcgcgatgccttaagccattttctggatgcgaggcatggcgatatccttgccgttaatggtcccccgggaaccggaaaaaccacgctggtgctttctatcatcgccacgcagtgggcccgagcggctctcgaaaaagcggaacctccggttattatcgcgacttcaacgaataaccaagctgtaacgaacattatcgaggcgttcgggaaagatttttcccaaggcactggtgcaatggccggacgatggttgccggagctgaaaagcttcggcgcttattttccctcaagcactcgtaaagccgaggccgccaaaaaatatcaaactgaagatttcttcaaccaggttgagtcaaaagagtatgtagaggatgcactgctgttttatctggagaaagctaaggcagcctttcctgaaaaagagtgttcatcccctgaaaaggttattgaactcctgcatggtcagttggcagcaaaatccgagcaactggtaagactgaacgcaacatggcaaacgttaagccaggttcgggcaacgcgagagcttattgataacgacattgagcaatatctcgataatttaaataaattactctccgggcaagaacaaaaagttactcaactaaaaagtgctaaagcggaatggaaaaaatatcgggccagtgaatcactgatctatccattattttcatggctaccagtggttcgcagtaagcggcagtaccaaatacaactgtttctcgaagataaattaggtgcgctgattgcgggaaatcaatggtcggatcctgaaaccatcgaacgtaatatcgataggttgcttaattccgccgagcgcgagcaaacaacctaccggcagcagattgactccgcgcatgaaatcgttcttaaagaacagcaggcggctcaggaatggcagaggctggcacttgatttagggcatgagggcgacgaggaactgagcttctcacaggcagatgagctggctgatacgcagattcgcttccctgcattcttactgacgacccactactgggaaggtcgttggttgatggatatggccggcattgatgatctgcagaaagaaaagggcaagaaaggtgctaaaggggtaacagctcgctggcaacgccgaatgaaacttaccccatgcgtggtcatgacctgctatatgctgcccggcaatatgcagataagtgaacataaagggcagcgtaaattcgagaaaagctatttatatgacttcgccgatttactcattgtcgatgaagctgggcaggtgcttcctgaagtggctgctgcctcgtttgccttagctaaaaaggcattagtgattggtgatacggaacagatcccgccaatatggagtattactcctgctattgatataggtaacatgctggcggaaaaaattctgtcaggcagtacgcaagaggagattactgagaaatatacggcaatcgcagagcttggtaaaagcgccgcatctggcagcgtcatgaaaatagcgcagtgtgcctcacgctatcaatatgatcccgaactggctcgtggaatgtacttatatgaacaccgccggtgcttcgataatattattggatactgcaatacgctctgctatcacggtaagttgttgcctaaaagagggtgtgaagagagcaatttaatgccagcaatgggttatctccatattgatggtaaaggagagctggcaagtagcggaagtcgatataatttgctggaggctgaaacgatagcggcctggctgacagataaccagcaaagtattgaagcgcattatggtaaatcgcttcatgaagttgtcggtatcgtgacgccttttagtgcgcaggtaccgaccatcaaacaggcgctggataaacaaggcatcagcgcaggcaccaatgaaacgtcgctcacggtgggcacagtccattctcttcagggcgctgaaagagcgattgttatattctcgccagtctattcaaagcatgaagacggcgcgtttattgatagcgataacagcatgctgaatgttgctgtctcccgagctaaggacagtttcctggtcttcggcgatatggacctgtttgagattcagccagcctcatctccgcggggattactggcaaaatatctctttgagtcagagaagaatgcgctcacttttgattataaagagcgtaaggatttaaaaactgccgagaccaaaatctacacactccatggtgtggagcagcatgataatttcctgaatcagacgtttgaaaataccgataaacacatcacgatagtttctccatggctaacctggcaaaaactggagcaaaccggttttcttgattccatgattacggcgtgttcacgtggtattaacgtcacggtagtcactgacagaagctacaacactgaacataatgattttgagaagcgaaaagagaagcagcagaaccttaaagcggcgctggagaaactgaacgcccttggtattgcgacaaaactggtcaatcgtgttcatagcaaaattgttattggtgatgatggtttgctgtgcgtgggatcgttcaactggtttagcgcgacacgtgaagcgcgatatgaacgatacgatacatcgatggtttattgcggtgataacctgaagggtgagattgaggctatttataatagtcttgataggcgtcaggtttagggcaggagtgtgattagccatcttatcagtgtttccccagggtaagatggctgtgaggcattttcagaaggaatcattgtggcgactaaaatgtggatgatccgcggtgatggcggaaaattgtacgatgacttcagagacaagcaggttgttgctatcggctggtcgcagctcgctccctatgtgaaaccgggatgctcaagagagcagttgtttacccggtatcaggagcttgagccacagactaagtcaggcacagttcgttccggtgcttcgcaggtctggcgctttgtgaacgagatgcagaaaggtgactgggctatcacttattcaccttctaatcggacttatttgatagggaaaatcgcctcagattttgagtttcatgccgagtggcttgaagatggcatgggcatcgcccgtaaagtgaagtggaacgcggaagagattaagcgtgatagtctgagtgatgcaaccagaaacacccttggctcaacgctgacggtttttcaggtgcctgattttgccgtgaatgaattagtgcagggcaaaaagcctgtctcagatgtcgtgccggaagtacctgtttcaggtgaagaggatgaggttgtttctaatcctctgcgtgacatggaaatgattgcctttgaaggcatcaaagatcgtatcaaccgtctcgactgggatgagatgcaaaatctggtcgcaggcgtgttacgcagcatgggatataaaacccaggtatcgcctgcgggtgctgaccgcgaaaaagacatcattgcttcgcctgacggttttggcttcgaaaatccgcgcatcattgttgaggtgaagcaccgacgggaacagatgagcagccagcaaatccgtagctttatcggtggccgtcataaagacgatcgcgggttgtatgtcagcacaggcggattcagcaaggatgcgcgctatgaggccgatcgctctacaatcccgttgacgctatggacgctggacgatttagtacgtgcgttagtggaaaactatgagcaggtggatattgaaactaagctgttggttccacttaagaaaacgtacttgcctgcatgaagggaaaccaggggttacagtaatcgtagtgatatttagactaatatgaattttaactaaaataacgacgatattgattttatcgaggagtttgacccactcctcgatatatttagtttactcccaacgccttataaaccgcatctacaggttcagagtaaaaactgacctggaatttggtaaacaactcggctggcacagtcggaatatctaccgcggaagacatcggcaaaaggacctttttcgcgccactatcgaaagcaagttgtaagctagccgccagatcctgaaccgggttgatcacaccaccgagcgtcatgctacctaacacgaccatttgttcctgaacgggtttcgccagtaaaacggaacacagcgcgatcagcgcggcaagactggtcgcggtacttggtccagtattgtgcaattcgactacgtgcaggtggtactcatgttcagaaaatttcgctgttgcgctaacgcggctgaggttgcctttgaaatagtcaaatccaacccggatggcttccttagccgaggtgcttgatcccagaccagaaacgctatgcttaccattgcctgcggtcatctgagtttcgaagcgatacagacccgtcatgccactttccgcttgcgtaaccaaatgcactacaccaggtttgggcatgccagcaggaattaattcgctgccaccctgttccggcacgctgacgaagaattcttccagcgtctcgttatcaatgtagctgaaatttacatcgaagaactccagaccgcccagctttttaagctgttctttgacgcgacggcgagcttccatggcgtaggtcaggcaaacacggacatcttctttgctgtaagaaccattggggtgaagaagtttcagtagaccagaaaccgtgcgccttaccgcgataacgtcgcgctggttgaggttattacccagcttatagaacttatcaatcgcgtcggagaagctgcgcttacgcatttcccgcatgtattcggcgagataatctgtgataaggccgtagcgattggtaaagaattccgggcgcattttcggaatttcccagccggggatataggcatggaagcggtcgaaaaacgccgtatcgatcatcgcggcagggaagggggctaacagatggctggttttgactagcgtctcaacgctttggttaatgttgccgacgaacaccatcgatgctttgccttcaatcgaatctcttccgcgggaaaacgagccagacgccatgtaatccttcatgatttgcacgccgtctttgtctttgaaagtgatccccgccacttcatcaaacgcgacgacatcccacatgccaaccaggccaatctggcggctggccatgttgtaaaacaggttggctaccgtggtttgcccgccggaaactaacagtgagtttggcgaacattctttatagacgtggcttttaccggtgccgcgtggacccagttcgcagacgttatagttgttttccacgaaagggatcatgcgggtgatcaggtgccacttggttcgctgctcaatgttagcgggttccatacccacggaacgtagcaggacatcaatccactggtcgcggttgaagtgcgtacgtgcggtaaatacctcttccatgtccatattgggcatctggataggtttaagcgtcatcagagagaagggcgacgttttttgtccttcctcaaagaagtagttcacggtgatcatgcaccagatgccgccggtcaacagcttctcgttgtccttgaccatctgcggcggaaccagtgcatctttaatgccgaggttggagagctgggcttcgtaaacgtctttcttctgattgagctttaccgatactttatcaatgatcttgtaggatcctcgctcacgaatgagcgatttcaccttctctgcttcatcagggcggacgtagttatcagccagaatacgcttaacgttctgcaacccttgctcgacgatctggtcatcgtcggaagcgcagtacataccgagcagatactccagcacatagaccgggacatttgccccttctttgagctgtttagtcaggtccttacgtactacccgaccacgaaaatgctgattcagcaaggcgtccagatcgtaaccttctgcgacgagttccccttcggatacagctggaacgggtaagtcatgatgggtttgcatagcgcctcacttaaaagaaatcatcctgaaatgccagatcgataatcacagggtacttctggtaacccgtttccgtttgtgcatcttccagtatcagccagtattcattacggcgattgaaattcgcgccaatcagcttcagcgtcacgtcacgcacgcgtttttccattgtgttgttatcgctgtcaaagcagattcgctctttaccggataccacattattggcgttatcgacgatgaagatgttcagagtacgtggttcgtataactcacctaccggatgggtttgcagcaggctgactttatcaatgttattgacgagtttgatcagcggatgatgcttgacgatgtctaccggacgacgctgaggttgcttctcggcagccgttttctgcagtgctttcacctgcaatacgggaacgcagacttcctgtagcatggcgccaccatggacaaaccgcgcgccgcccgagaaatggaaacgctggatccctttcgggatcaggaactcgctgttatcgctgacgcctgcggtatccgccacttttcctttccagcaaaaatcatcggcaggaagctgatgaccgataataaagcgtttgtggtttttaatcgtattgtctggcttgatctgcagcgtggttttatcctggccggaaaggggctgctgctggaacaggaaaccgtggtccgccgtgacgataatccgtgtaccgtggagacggtttattacacgagtcactaaatccttcagttcaaccaccgcgttacggcacgcttcgaaggtcttctcctccgtcgatgcgctgtcacccatggcatcaatggtgttatgccagatataaacgacttcgtaatcgcgaataagatctcgtccttgctgatttttccatttcagcagatcgtccgattttactgccatccctttatatttcttcagaatggtatcgcggttaggcgtacctgaggtggataacccgtccgcataaacgatgtcaccactacccggttggtagcatatctcgtcatggggcagcaatgccgccattcccagctgggtatagctgggtaacacgcccaactgggaacgcagttcggcagtaaagcgtttctcggtattgatctggttgcccagctcttctgccacttcataacgcagcgcgtcggagataatcacgaatacgcgcttgatttgtggattgttaaactgcggcttaaccacctcattgtagaagttctgctgccgtggtacgcccgcaatacgccactcctgcatacggttttcggtttccagaaccttattccagctccggcttaattctgccaggtaccagttggaatacagcgcttcgatatagtcatccaggcttttcaggatcattgcgcctttgctgtgaaccaacagcgcgtattcgttaaacaggcggtaggcctggtcaaagcggaacagctcctcgcagtacgctttccagaacgttgcgctgtcctgatagtggaaaccatcaatatgacgattacgcagattcagcaaccgttcggcctgacgcagtgcatcgtaaatagcgcagtattcctgacgcgtctggcaccagtatttgctctgacgttcagacagaagcttcttaaaggcttcacggtctagcgtggtgctctcttccagaagctgcgtcaccagcgcatgaatgatggtctgttcaatgctcagcgtggtttcgcactcgtgcagatcatacggcgagctgagacggtactggtcttctggtcgcagcgcatcctgcatctgctgtgcgcaataatcataggcttctttgtagcgacggtcggcgcgccaggtgaccataaaggccagcgcggaggctctgcctgacggcgtggccagcacgtttttttccagccattcgcgtttctgcggatcagcctgcgcggaaagatcggtacagaacagcttgaggatcaggttttccagggtcggatgctcggcctgatagcccatttcctgattcagaatgtcccacagaacgccttccaggtcgtggcgtttcagcatcgccagcgtgttttccaggtcgctgtcgtcatctttctgctgattaacgtattgggtaatcaggctgaacagaatctcttccgtttttgctgtttttacgccagcgatgaccgcaaccatcttcttatcaagagaagcttcgttttcttgctcagtgaccaggcctttcaaggcagaaagacgtttagtgctgaaaaatgccttccggcgttgaatgtgctcgcgtaggccaagctgtggaatacctaatgtattcagcgtaatggcggcgaaatcggcgtggaactccgtactataaagacgaatatccaatagccagtcgaactcttttgggggggcatcgtgggggaaccacagcaaaaactgctgttccggctcgtcgatttcaatgcgctttttaaccgccagctgcgactggtcggtcatatcaagcagcgtgacgttttcgagttcgaggttatccagctcttcgaggaaacgcttatcgggatcgtgccagaaaacgatgcgatgttcggcgaattttgctttaaggccggcaataaattcctgattttgcaaggtcacaatcccatttcattccagataaaagttaaatcgtcaggtacgggtaacgtgcggaacagatctttttgacgttgttcacgagcccgctgacccaaaagctgggttagcaaggggtcaattgcctgttcgaaaaacattttaccatgaaagcactgtgttaattgcgtcgttggggagcgtgcggcgatgttagttttttgcgtttgtatctgggctaacaagacatcgggatccagatgctggctccactgccgtaagcattgttcaacttcagcatcattctgtgctgtattaagatcatgaaacgcagtattaaaaccggcagcgcgcagccgttcccaaagaggatggataacattccaaagtgcggcatggttccgccattgaggtaaaacatcatgaacggcctggataaatgcctgtatgccgccattgatcgcctgctgatgttttggctgaaacaccagccaaagttcttccggcgcgatcagataactttcaatacaaaaacgcggaagaaccagtagattagctagatttcgacgcttttcagcgatctgcacgtcagtccatgcgtcacgatcaaccacgcccagccagttggcttcaagggctaacgcctcaagcacatttttcttagaacctgctggtgcaaggatccaatcttgttcccatgccggaaattttctgctgaggaaattctggaaagccgtgacatcatctgtaccttcaaccagcagtacccgtctgccggttgtggccactttttgttctttaatgtcccgaataatttgcttaacgctggccattttccgcatccttgccatcggttaaatcaatccgcaatcccatgttgtcataacgttgccagatatccgttgcgtgtgaagtcatcacaagctgaccatttttcctggcaacgatgttctcaatggatgccagcaacggcgatatcagggacggatgcagatgcagatccggctcatcaatgagtacaacaccgccgggctgtagccagcgttgtaccgtaaacagcataatcagcacctgatgttcgccggagctaagcgcatctaacgaatgatcattccctgaatccagtaggacacgttgccgctgtcctggatgaatttcagcttcgatacgtttaccgctgaagaactggtttagcgtggcgatcatttcaggatattcaccgggcatggttgccttcatattgaagagcgacgattcaagctgacctttccagttatcgttcacttcataggttgccagccaggcttgagttgaatcatccggggacaggctgccgatatctttttgcgggcgaacccagcggcgcgcttcggcatccaggtaaaccagattaggcatatcaacacttggtcccttcagtacaagccgttgatactggctactccagtgactccaccagttcttatagggaagaaaaaagtgttccgatgacgtaaaaacggtcgtctctggcgttgttccctttgttctgcttaccgtttccccgagccagtagacctgtgggtatttctcttttagttgtactaaaaatgcctctgagccaagaaatagccctatttggtcctccgattttggcgaaaaggaatcgagaatcatcgcgcagctggcatcccagcgatagaaccaggtataagattcatctttgatattcaggcgcgtacccgtgcccagccaatgcccaaaggcgcgccataataaggaaatggctcgtaacagcgtcgatttaccgcagccgtttggcccggtaatcaggacattggattctatctcgcctgaccagtcgttttcaaaacgaatttcaccgtcgggcagcggtccgacggattgcgtataaatcgccgctattttcattaaataatctccggtgcattgccggtaatggctttcacatccgccagcagatcgccaaacttaccgtagttaaccttaacgccgtcgtcgagatcaatactgattctcatatcagcatagtggcgcaggcgatcgtcgaagctgcgcagttcgttgaattttttgctcaggctatcacgctcacgtttcaggcgggtggcttcgccgcctgaggctccatcgacctgttcgttcaggcgatcgatattggcctgatagcgcgccagcagcggcactacatattcggtacgcattctcgccagcgtcgcatcgttgtagcgatgcagatagaccaggcactcaaacgctttctctttaccggagctgaacagccagtatatcggacgctttttatacatcttcatatgatctttccagaactgagtggaaagatagcggcggatggtatccagcgcagattcgcctttttttggttttatcgcgtataaacagaggctttcggcgataaattcgagattttcctgcaagtgttcttcgccccaaacggtgcgaacaaactctttgacgcgagaggtaacgtcatcgtcaaaccactcgtcatccatcagcggcaggataccgtcattgtcagccgggaaggttttgtacgcgtcttcagcgaccagttcggcaaagcctttattgccttcatgggcatagaccagtccttcgcgatcgagggagtagcggcccatcatgcagccgatgatgtagcttaagatatctatagtgatatcagtgtaatacttattggttagatcggtatgatcttgaatatttttatatcgatagtttggattacatagtagagttatttcactttgcaatacagctttaattatagttttgtcaagttgtaatttatctataaaaatattatttatagtattttctattaggagaagtgtttcgactaacttgatatttgtattgattttttgtttgtagatattccgtagcaattgagttgaattgtgttcaagcaatggtgaacaaacataatcccatgattgctcttgagagtcccagtcatttttagctatttcaatagcattggtgactaattcgataatttcatcttcaatttctggatatggtactgaggctaattcaccactagtaaagctaagtgtgggggctagtattgataaataatggtttacaaccggagtgcacattaatcccgcagcgtaaagcaactcatttttgttatttgaaaagccgcaacggcctgtatcatcaaaaacaaacccttttggacgatatctcacgcaaaaattaccttggcttatttttgaccatgttatgccttctctaaagtaatactcatcatttcttacggcagagcgagttttgccattctcaaatttaaaatttcgtatttcgtaaccattattttcccaatttacaactatttcgttattaccataccactttcgatattcacctccactactacaaggaaaccatttgatattatgaatgtcgatttttgtatttgattctttatttgtgataagggttttttttattgaaacctcgtaccaatatctttgaaatttaatattgtcaccggtggacatgcctgcttttaatgctattttttctccaagttttttatggtggcgaaaagataatagactcggtaagtctatccaatatgctattggcattcctggtatgtttttaaaatcatgctgtgtaaatttatcaaatatatttttccttagaagtagatcgcttttctttacttcttccctaccatctataagtctaaaaaatacaggttggtaacgttcggagtgttggtttttaatcacccaggcagttgtctgtacaacctctccagaaatttgcccaaaagcccgagctcccaaatgtgccatcgtaataaatgttttattgtccaataaccagttacgtagtgcttcataacttgacaaaaacatccatgattgcatattgacttgagcattaaacccattttctttaagcaaagaaaatgcattctgcataaacattgcaaacaaatcagctttactatccgggaagttatttttggcaaactctttcagctcactattcattcccttgccacccatatacggcggattcgccactaccgcatcataccgctgcgccaggatccacgcctgctgaatatacggaataaacgctttcgccgctgccttctgctggaaatcgccttcctgctccatgcgatatagcgcttcgagaaacgccttcagttccgcctcttcttcctgtggcacctggatcagcgagcccagcgttttggcgttcacaaagcgcttcagcgtgcgcatcagcagctgatattctgcgctgtcggtatgggctaatgctgtattttcggcaaacatatcccccatgctaccagtctggttctgctggtggaagttcagctgctgccacagcttagcaatatccagatgcaggctctcctgcagggagacaatattcagacgcacgtcgcgggtgaatatccggcggtcatcctgacgggccatcattaataaggcaaagccggaaagctgggcagcacggtcgtcaatgtcgagaccaaaaatattattttccagaattagctgtggaatatcgcgggcgcgatagccgcgctcttcatagatatttttcagcacattatagacttcaatcagaatatgcccggagccgcaggccgggtcgagtactttgatgctttccggttcaatactggcaggtgtaatggcggccagctgcgcctgcacttctggcgtctgttcggctggctcaatgtagtagtccattttgcctttcagcggcgaatccgggtaggtctgcaaccactggcggccgacggagttctgtaccagatactgcacaatccagtttggggtaaacagctgggtggcggcaggaatatcttcgctcttcaccaccttaccgataaccgcatcttttttctcagagatatagaactgatacagccagccgataacctcaacttcttgccagtcttcttccggaataccgtccaccagaccgcgtagaatggagtcggtgcgggtcaggttatccggcagcagtagttcagcttcatcgtccacagcttcaaacaggaacggcatcgcgcggtgcagggcgtggcactgggccagcagcagttcacggtagatggcttcgtcctggttgccggaaagcttcatctcgaccagctgcgcctttttctctggtagtaatgcttccgcgacttccggtacgtggtccagcacttcaaagcctgtcgggttatccgggtgcgagagcatgtggaagccgtggtcaagataaccgtggatttccatataacgaatggcgcacaggcggttgaaccaggtgtaggcacagtgctcaaccagcacgtcaaagccctgctcgcgggcgcgttttaccagacgatcgcggcgggtgagggtggatttggggtagtcgaactgaccatagcgcatggtttcgccgacgagctcggcatccgcaatttgcagattgccttttttatcagcggaaatccccagcgtggttagcttttggatcaccgcatcgcggaactggttacgggcctgtggagcgtattttttgatgttattggtattcatagaaaatcctgcaaagggcagcagagcgctgccctgaaatgggggttactgaagacgaatccggtcacctgcctcaatagctgccagcagcgaagtacgaagcgtatccagcgctttttccacctgttcggcggtttccagcacttcgccaccggtggctttgcgcatctcgctggcgacattcaccagatgcgtttttttcggtaccggttggataacgggtttctctaccacaacataagtctgttgtgactcggccgcgcgtttagcttcattcgctgctcgtaactgggcttcctgctttttacgcagctcgtcgatccactggttaatcttcttctcggcatccgtttgcagtgccattgtttcttgctgttccgccagaatttccggaattgactggctgacctcggcacgttttctggctttttgcatcggcagcagaacgctgttttgcagctctgacgtggcatgcgcttcctgcaagcgttgacggctttcctcaatgcgggcgtcaatgcgttcaagggcgtgctggcggtgctgttccactaactgatgattgacgttctggacctgttcaatcagtggtgtgatgcgattgagatgcttataaggttccggcatctgccagatgttttccagctcgcccagtgcttttaccgccacggcgtctttttccagcgcgctgcggttggatttaaagctgccgttcagcgccgcgcctagtttttgccaggtagcaaactgcttgcggtagaaatcgaccaaattttcacgatcttcactgaaatccagaagctcattgacctggctggtgaccttctcaatcagggcaaaatcttctttttcactcagaatggaattcagcaggcgcaggcctgactcaatctcatctttacctggattgtttccaccttccgctttcgctttgaagacattcagctcttgcttccagtcattgaagacctggcggatatgttcaaccagggccggttcttcacgttcgctaaacggctgttgggcaatttccgccatagtttgtgcggccttacgaatttgcgattcgtcgtgacggcgaattttgtgcagacgcagctcgctgtggcgacggctgttattaaacagctcccacacctgcttacgctcgatattgttattctgctggctgaagctgaatttgcctttgcgcgccagacgggcaaccagcagcttcacttcttcttccggccatccataaggacggcgggcaaagtggttcagaatatcgcgtaaataaaccggcttattgaactcgatattcatgctgacccaggtttctacttcgcgcatcgcgtcggggttggattcctccagttcgcccagatccagctccgcatcattctccaccgtgagtagtgcatggatttcacgtgcgatatcaccgttgaacgggcgcagcattttcagcttggcaaacgtgttttcaatcacatagcggcaagcttcatccacgatgctggatggcgtcgaagatttcttcggtaagcgctcgccaatcgcccagacgtcagcttcggcaataagcgactccagctgaacgcggagcattttctcgcgaacgctgttctcacgggctttttctgaaagcagactggcttgttccggtcgctgacctgcgttgtccctgaggaatttttccgtttggacgaccaaatcaatatcggtccaggtccgggcatcggcaggtaaacgaattaaaatgcagccgtctccctcagaggtgtatgggcggcatgccgcgtcgttgtcatagaaatcataggtcggatcttttggcgtgaggatctttaccaccagatcgttaagcattgcgccgtctaacgggtgcccgttcaggaagcggctgatatcaaagtcctgcttatttgccggatagcgatacttccggtttttcagaatgtcatcaaagatgatcgaggccagtttcttgttgatcgcggagaagtcgacttcgacgttacggatctcgttctcgatctctttttcttcgttggtcagaaacacgtatttgtcttcaacacgtgcaatcaacatttctcgttccagcttattcaggcttttttcaacgcgacggcgtagttcgactttatcggtatcgattttgtctatcgaaagggtaaccaggttatctaatgtacttttcagcacatcgacgtagcggatcaggaacagtgttttcagtaagttgccatcgaactcatcaagaatgccattctggcaggcctgagtgatggtgcggctgacggccggctccaggaagctttcaatcgcggcataaaaacgccagaagggaaccagagaatccagaccctgcggggagatctgctgtgccgcagtctggaaggcttctaactgtgagcgttcacccatggctaactgtttaccggcggcacctttggtccggatagactcaaaaaccttctgcagaatctggtagtgccacgggacaaacgggtagttatcaataaattcttcttcgctggtgtaggggcgcaaagaagcggtggttgtgggatcaaaagcaagctggttacgtagaatgtcgcctttttcctgccagactttcgccagcgcgggttttgcggcatcggttttcaccagcaaacgtttttggataacttcggaggtgttggagcttgaaagctgcaaacgggtagagaaacggccttgaattttagagaaatcttgtccgtcacggctgctcatcccaccaatggccgcattaatatccgcctgggaagtaacaataacccatgcgcgtccaccacagataacacccagattttcagtgatagtctgcagcttcaacatcatctgcgtatttttaccgatgaactggccgacttcatccaccatgaagaggatatttttgccgttttcatccagccactctttgacccactggcaaaaattattgatatctaatgggaaattcttatccagctgttccacccattgacgcgaagcgtcaacgctttgaccggtggcctggcttagggcttctgccatttcatcgctgatgaaatagtaggaatcgcgctctttttcccagcttgagtcagtgatagtggcgaatgcggtcttaaacgcgtcgtattggccgcgtttagccagctcacgctccagatgggcgatgtgcggaaaatcagcacagtagccaacccgttcgttaaataccttcaggaagactttaaggatggcgtcttctttgtcatcgacgttagcacgagaatcaatattgaacagaatcacttccgtcggatgatggaccgctttgttgatatcagcgaggaacagagcatctttgattttgtcttcaaagaaggagtaagcatgacgttctgtaccgttatggctgactttgcggttagacaacagatacgacagaatcttgataaagtgtgatttacctgagccaaagaaccctgacacccatacgccaattttgttttccatgcgtatgcgatccggaccggttgccggaacataagattcaaagaagtggcgaagatgcccttccagttcccgggtgatgacgtattcatcaagctcaatccaggcactggcatcgtccgtctgttcggctttcacaacgccattaatatttcggtccagacgtttctcaaagatctgttcaatattcattgctgtgctctttaacgaggattcaatgtcgccgcaggcccgctttcgggtaccagcctgaaggcgcgataataatttcgggaatcaatgcccgccaatggggagagatcgtgtccgctataggttcccggataaaacatcagcaggggggtaaaacccatcacgtcctgcaaggcgctcatcagctcatggccacgaaccagcggccaggcgttacccattcctgtcagaatgacaaactcttgattctgaagatcgactttttttgctatgtaatccgcgatctttttctgattcaataagccaacgagttgttttttcagcgcttcggtaccgactttcacttcctgctgacagacgcggtcaaataacccacgttcagtgagcatgtcgacgatgatctgaaagatgttgaggtgcgcgaacttgtggtccttttccagattacgcaacagatacttcaggtgttcacgcacctgcagctcattctgagcaggataatcaaaaatccagaacccaatctcattaccggagccgttgtttttgagaaagcgctcttcgctaatgcggctctgaacctgtgacaggcggtattcaagcacgggatcgatcaccgttgtccctccagaatagaaactaattcttgttgtccaaggcgctgcaaggtcgcctgagtttctggtaaaagaaagaccgactggagattacgccgacgaggtgtatccagataaccagcttcagccagtgctttgatcaagttgttacccatttttttgatggatgaatctgagtaactggtgagtacgggctgctgacgaagatggttagccacaaactcatcccagctatccatagggagcttttctttaaattgtctgcacaggtcgttcaccacttcagccaggaagtctttaacaaccggtgaatggaggatcagagcgacgaacagcaattgctgacgctcgcgctcgctcccttcagcaataagcgaccacgccactttatcaagcgtattcaggcgtagttttatcgttgtagcatagcgcttcgccgtattggcagaggaagcctggagaatgttatgacccacgatctgctcttgccaggtttgttcattgggagcggtaagcatgagctcagcgatgattcgactttccctgctcatcagcggcccgcctagcaggtctccaatccatgccttgtcgtttttcatcgtcatatctaccctctgaagactgctatgcagctcgcaaaaaaacaaacgatgattgtaatgggggaaggggcgggatgccatgagaaaaggcaatttgtgagatgaaagccattacggagaccggtatttatccatccctttgaaaaaatgatttttacagtttgttcattgagttactgatttgacagattattcggaacggtaagtcatataaatcttttgtacttcggggtcatccaggctttcataagagatgttctttttatctaaaccatccagccccttgatcccgccaataatagccagccaggcactccggtctgtgatgctcacaacgaatggttccaggtaacgatcaaggtgctttttggatggttctccgatttcgtcgctgagtgccttcaaatagtaggtaatcggccacggttctcgcactatggtctgtagcgcgctggtggagtcacacctgtagtcaagtgacgcgtagagcgccagatgaaccattacgagcgcaagcagaatttataagggcggtgccttaaagagcacagggagattgtaagtagcccgatattgctggcttttgcttagcttgctgacgggattcgtcgtatgaaacatgaaaattacctcatgttttatataaggattcgacactatatcaaaaccggtaactctcaatctttcaaagctatgtgtcagatcaggtcgtgataagacacataaatttaaagatctatatatctggccagatagacttttttataacagctttataaattaaacaaatctgccatagagacagatttgtttaatttataattagaggtttgcaacgttatgatatactttttgcacatcatcatcatcttcaagggcatcaacaagtccttcaaagatttctaaatcttctggtgaaagttcaacttctgattgagcaatcatttctaattctgttgttgaaaattcagaaattccagctgcttttagcgctgcgattcctttatgcaggtctgtagcttcagtataaataacgatgtttccttcttcttcggttacatcacgaacatcaacttcagcatcaagcaaaatttcaaaaatatggtcagggtctgttcctttaaatacaatcactccagtattgtcaaacatatagctgacagcacctgccgctccgatattcccgccttttttattaaaaattgtgcggatattagcaatcgtacggttaacattagacgtcaacgtttcagcgataaccattgaaccattgggtccaaagccttcataacgcccttgcacgaacgtttcatctccgccacctttggctttatcaatagctttatcaataacatgttttggaacctgtgcttgtttcgcacgttcaataacgaattttaaagctgagtttgattccgggtctggttcaccttgtttagcagcagcatagatttctacaccaaattttgcatatactttagacgttgcaccgtctttagctgttttcttagcaacaatatttgcccatttacgtcccactggaaacatctcctcaaaaaattatttacattaatggcaggttaataacctgcatgtttttctgccgtattatatcataatatataaattctcgtctatgagaaataaaaacatccagcttttacggggggttactttgattttaacaatggctaatatggtgggtaagccattttttaattttcttctggttctttttttatttttaataattgaattgcagcaataacgtcttattgatggtggtgtcgctcatcaggtgaggtggaacgcttgcacgtcttgcgacatattgtggcagaaacttaatggcgaaattaagagcctatcccattagggctattttacttgccattttggacctgggcagtgctcaaaatcctcacgtactacgtgtacgctccggtttttgtgcgctgtccgtgtccaaactggctgcgccaataacgcctggtgggatagtctctaaggcgatatattcccgccttgagccgtgttaatttgttggatacttttaaatggaggtatacctcttgtaggctatacctcctgcttcacgttatcgcgcgattaacgcaaatacgccccagccaaagtattctcgcgtccaggtgacgtgacgtttgggggctaccgtcagttctgttcgaacctcttgcgcaaactcatcgtcagggttttcctccagccagcggcgcatggtcatccacttcgcggcttcatatctgtcccagccttgcgggtccgccagcaccatttccactacgtcatagccgagttggtcaaaaaaggcgaccagctcgggcaggggacggaaatcggcgacggatgagacgccacaggcgtgggcgatctcttccgttgcggggatccgacgccagtacggttcaccgatgagaatgatcccgccaggtttgaggcttttggccagcagatctattgtccccgcgacaccgcccgcaatccaggtagcgcctacgcaggccgccacgtcatatttttcctcatcaatataaccggccgcgtcgttatgaataaaatgtacatattcactgacgccgagctcttctgcacgttgttttgcctgtgtggtgaagagcgggcttatgtcaatgccagtacctgtaacaccgtaatcgcgagcccaggtgcagagcatctcacccgaaccgctaccgagatcgagaatccgcatgcctggtttcatgcgtaacgcatggcccagcgtggcgtacttttccgctgtaaacggattatggatacggtgttcgctttcgctaatggtaaaaatacgtgggatatccattgggttattccttttactgagggcaataccctcagaagtggatactttttcaaccagcagcgcaaacagcttgcctgcaaaagtctcgccgaccggccaggtgtgactgtccgggcgctgcaacacagtgaagccagcatcaccaagcaggctgatatattcatcatcgcgccaggccttcatttgactgccgaaacgggtggtacagccgttttccgctatcgcccagaactgcgttgagctggtttgggcctcttcatcccaggcattttccgttaacagcagatgaggctcggcaagaaacaggccgtgcggacaacgctgccagcctggctgcgccatgccctggcgtttaacttcatcgaaggtatgcacttcaacaagcagtttgccatcgggtttcaaccactgagcgcaatgactgatgaggctttgcgcatcagcagcgctaaagacattcagttccccaaacgtcatcataatgaaatcaaaaggttccgtggggtggtatgtacgaatatcctgctgaatgtagtcaatattcaggtttgcggcttgcgcctgctggcgagcccatgtgatggatgccggagagaaatctacgcctgtgcagtgaaacccacgctccgctaacaggcgggtataaaaaccggggccacagccgagatccagaatgcgggcgccagcgggtaactgacgggtaatccatgttacctgttgctcaatcacggttagccggcggctggcccagtcgtggtcctgcgacagatgattttccagcatgcgttggctgaaggctggctcgtcccaggggattttgccttcatcgggtaatagccgaatgcgatgcgttgcaaaaataacggcgctgatatccatcatcatctccttagcgattgtcaggctgggcgcgaacgttgttcagcccggttgtattaatgcggtagggctgaccgttaacggatttgatcagctttttggttttgagttttttgaatacagcgagcgtgcaatcggcgagcaacagcccttcgcggctatagcactcaacggcggtgacgcggcctgacgcatcgcggatgtgcgtaatgcgtccgcctttggcgagaacgtgtaaggtacgttgttcctgacgggataaattcatactgaagaacctgtttaatcatcataggctaaacgtgcaaacacactgcggtgtccgcattcgatttcggcgcattgataatcagtccggcctgaaaaggtcgggtaactgattatcagatgatgacattctccagcatcaaagcctcgggttgagttgaaaggtatttacgtcgtgaatgataacacctgatttctgtaagtgaataaccgggagtgaaaagtgtgatctcaaagggaggctcatgacgtttagcgtatcagatgaatagctcccgcaattaccataatgaatattgattaaactcatatacccgataatgaccgctttgatagtctcggcgtatctttttagccattgacagggttgttgcgttggaaatctttttttaaccaactgaaaaatatcacttaaatatttttcatacataaacatttatggtccgctgagttcggatccggttttgtatgggttaaaaaaggtacgttatgaaagtcatatggactgtcactcctgtggggtatcagcgcatagcgaaacgttgcccttcatgcagcgtaaaacgggacttcacgccttctggggcatttcgggttaattcgcaaaagaaggtactcgatgtctggagtatctataaatgcacacactgcgattacacctggaatatctccctgttctcacgcctaccagtcagcaaaattaaccgcgatctttattgccggctgatggcgaatgatgctgccacggtgcaatattttgcttatgacaacgcgatcctgaagcgaaacaatgctgaattatcggggcagcctgattttcacattcaggaacggtggctggtcagtatcgcctcccacaagcaggtcagtgttagcgtcaggatttcccgttcttttcaggtcagcctgctgtcgattttgaagaagcaactcctgctaagcgcagccgaaatcaagagacggattgaaacagggcaaataagtggcgtcacgatgaaaatgcttaaatcgcgaaaactgaagaatgcgaaatatgatttgcagctctcagttgaaacactgtatgaccggcgaaggattgttctgacctgtcgataaaaataataagctcaccttacgtttaagtgtgctggtatggcaacgacgcaacggaatgaaagaaggattaagggacaggtgagctttagttgaataacgcttgtctgtggcattcagtgaaggctgaatgccatggataatccagattttcgcaccagtgatgatattgtatggattctttgcgcaagccagcagaatgacaaagggcgatgggttacaattatctgtagagtaaacaaaaggaatataatgtggcgctatacaatatctctgagaaaatactgactacccttgaaaaaacatctttcaccatcgaaaggctgcaggaacgctatgatcttcaggaggctatcaagaagaatattgatattgtcgcgccgggctgccttgtcatatccgaagaattctctgattgggaggatagtcggcggaggattgatttattagcgattgacaagcaggccaatttggttgtcattgaactgaaacgtgatgaaatcggcgcgcatatggaactgcaggcgctaaggtatgcggcaatgatttcaacgatgagttttgcgaaagcatgcgaatattatcaggcatatctttggaagcatgggatcgatgagaatgcaaaagagaagttactggattttgtggagttagaagaaaacgaactcgctgattttggtaaagatattcgcatcgttctggcatcagcggatttcagtaaagaattaacgacaaccgcaatatggctaagagataaaggtgtcgatattcgctgtgttcgcttaacgccttacaactttaagggtgaagtgctgattaatgctgaacaaataataccagtccctgaactggaagaatatcaggtcagattcagagagaaacgcacggaacaaattattagcagtcaaaagtcggagagggattattccttatataaatataaaggaaaaaccttcaataaacggaagcttgcacttgaacttttcactgactggattaataaacataatcctgcgaatatagatgatctcaagaataaattgagtgaagacttacagaaaagaacagtagcactggttgagcagatccctgaaaaaaggaaaaacagatatcatatgcaggaagatgcgttgattgagttgccgtccggtgagcgtattgctatatcgaatcaatgggggttagggactatagaactgcttattgattttgttcgtcaggataattttgtagttgaaaaagtaggttgacaggaagtaataataaaatagatcccattcattaatgggatctcacgtttcatccgatacgaagaccatggtctctttgtcagtagcgtcataattacgcaagcctctttactttgcttatcatttatatttaatgtaaatattcacgcaacaccattaaaaaataagaaaaaatggctcactgttgaactgatattaatacctgaaccactgaattagagtaatgtggcgctattcatagcgtaattttttctgttgcggttacagggggaggaatgcacacctttagaccatactcactaaggcatagcgatctgttatatgaagatattccgttagaaatacgcgagcaaataatcttattgattatcaatacgctaggaaactgctcctctttttatgatatgacattatactgctatcataatagtcattctgacgaagtttatcgaagaatatgtaaaacgttgcgcaaagagtatggcttattcaccttatatgcgcattcaacgtcatatctggatgaaatgagtaatctgttattaaaaacagatgataaaagaaagcatattgataccattgagcttgcttttaactatatagatacctaccttcggacctatgaagttacgcttgggttagaaccggataaggcgattagtgaattaaataatatatttcatgagcatagtttaaaatatcgatatgaaaatggtaggattgtaaggttgcgcagaataaaacggcttaaaaacatatgttattatttgtactcccctggagagtatggctttgtcgaatatgatcttatggaagcgtataatcgcctgatgcttaatgattttgcctgtgtcgtaaaggaatgtcatgcagtcttcagaagcgttcttctcagaattcatgagagaaaaggtatcgtatatcatgaacaagatagtttaaataccttaatgactaatctgatggcgagaggcgttatatctgctgaatatgcacataaatttcattttttaagtaacgtgctggagtcagaaatatttctgccgatggcgccagaaaaatcgcatcatcactacgcaatgatgctccgtatctctgaagagttggcctgtagtatctattatcttactgagcggagtatattttttcttacccagcgggctgaagaagacagtgtcgcgccataataatgatcgcgctgtcgctcagtcagactggatcatcgttatttaaatttgttcagacgtcggaattttttgttctgccgtctgtttttttagtgatgagctgttcagtgcaataataaggggtacagtacgatgactgatttttaaactgcatatcatctgtgtcgcatttactcatgggtattgggtcagggagagagaagaatgagcactattttaaagccttttttattggcggtaaccctgatgttaatcttaataaggcctggctttgcaacggaggatggagcgataaccatggttaaaacctacagcgcttatgactatttgcagacccgagcgcggttgatgcacgctgtcgccgatcacggtctggtgttatttggggaatttgaccatgccagagcggcacagaatgttaacctgaaaatgccgccgacaacggttctggtctttggcaatcctaaaggcggaacgcctctcatgctggcgcatcccgaactggcgctggatttaccgtttcgggtgctcattagccagcaagccgatgggcgaacgttagtcagttatcatcccgctgaaacgctgcaacgttatggtcttgatgccgcagacatacaggctttgaaaaaactggaacagctcgttgaaaaaagtctccactaaagctgaaaatcgggcgatgtgtttgcacaagtgatgtcgcgaataaatgcggtcacatcgtccattacctgatgcgataaggcggcatcgaaggtggcgctatcagcatcacagaacccgtgccgcgcatcgtacattttacactgcacccgggggcgcttttccagcgcctgccgcatggcgaggggatcaaacgctggctcataacgcgcgacaataaccagtgtcggacagagaggcgcaagatgaaggtactggcgtatacgggaaccgtaatagcaaacgacgccatcgcataacccactggctgcacttagccatgcgagcgttgcgccgacgctatatcctacgacgattagcgtctcgtactgcgttctgagatcgtggagtaatgtggtaacgacggcgggatcaaagccgacatttgctgaaaagtgacggtaagcctcctcctgctgttcatagcgaaagggggtatggtgaggaaacagcgcgggaatatagatgtcgaatccgcgcgtcatccattcatggcctgcgcgttggatatgagcgttaataccataaatttcatgcagaataatcgctgcccggcgatggcggctcgacaaactggaggcgttgcttcccccggatacgcctggggcgaaaaacacggtgtcttttatcataacgcgttcttgatacaaagagagcggctggattttcgccgatcacgctatgtcagaggcattattcctgtcaatgtacagacacattttatggcctgatttttggttgataaattttatattggtaaaccaatatgctgttcatattcaggcatcagggctaaaggtggaacatcagtcgtgtattgtctattgcctttcctttcatctggcctcactagcgaaacggcgcgcattattattttgttggttgaccagtttcgcgtttttggtgtgctacgcgtgctatccctctttacaaatgctatagtctgataccgggaaatcgcatcggacgggcacgaccaatatgaaatcaaacacttctcagcaaagaccttaccaggaagtgggcgcaatgatacgggatctgattgttcagacgccgtaccgccccggggagcgcttgccgccggaaagagagatcgctgagaggctcaatgtgacgcgtaccgtcgtgcgtgaagcgctgatcatgctggaaattaaaggtctggttgaagtccgccgcggcgccgggatctacgtgctcgacagcgcggataataacgagatggaaggcgctgacgtcaatcactgtaatgacgccgggccttttgaactgttgcaggcgcgtcagttgctggaaagcaatatcgctgaatttgccgctctgcaggccacccgcgaagacatcattaaaatgcgccaggcgttacaactggaagagcgagagctcgcctccagcgcgccgggcggctcagaaagcggcgatatgcagtttcatctggccattgccgaagcgacccataacagtatgttggtagagctcttccgtcagtcctggcaatggcgtgaaaataatccgatgtggctccagcttcatagccatctgggcgatacgctttaccgtaaggagtggctggtcgatcataagcagatcctcgcggcgttaattaagaaagacgcccgcgcagcgaagctggcgatgtggcagcacctggaaaacgtgaagcagcgtctgctggagttttccaatgttgatgacatctactttgatggctatctgtttgagtcatggccgctggacaacgttgatgcctgattatacctggaatagcgtgggcagacccagtccacgttttacttcctgtagcgtcttttgagtgacctcatgggcccgctcgctaccttttttcagtaattccattagcattcccttatctgcaataaaggttgcccgtcgttcgcgtatgggcgcgatcagttcttgcaggcaggtctccagctcatttttacagacacggtcgcctaatccgccttgttgataatgtgctttcatcgccgcgactttggctttatccggatgaaacgcatccagccacgtaaagacgacgttaccttctatttttcccggatcgctaatttttaaatgattgggatcggtgtacatcgcgctgaccgcacggtggatggtctcttcgctggcggaaagaagcagggtattgccgagcgatttcgacatcttggcgctgccgtcaatgccgggcagacgacccgtatcgctcaggagcgcctgacagggtcgcaataccggcgaggagaaaagactattcatcttatgaacgatctcattcgtttgctcaatcatgggcaattggtcgtcgccaaccggtaccatttcggccttaaaggcggtgatatctgccgcctggctaatgggatacgccatgaacccgaccggcagggaacgggtaaagcctttttgggcaatctcattttttaccgtaggattacgctccactcgggcgacggtaacaatattcatatacagcaccgttaattcggcgagggcgggtaacgcggattgcaggcagatcgtcgtcagcgtgggatcgatgccgacggccagatagtcagctaacacttgcggaatattatcgcggattttttgcggattactgccgttatcggtgagtccctgcaggtcggcaatcaggacatactgttggtgatcctgctgtagcgcgacgcgctggcgcagtgaaccgacataatggccgaggtgcagcgagccggtggggcgatcgccagtcagaatgataggaagggtgttcattaaggactcctttatgcttactgtaaagccgaaagacgtcccgaaacgcagtagccgcctttcggcggctacttaaagagggatagtgatccgtgccgccttcaggaaggcagccaccagcggagatgacgttgcgtagcgttggatcgtttcgtgttcatgtgatctaacgtatcacgactaaacgtaagggtaaagcggctggcgtatcgtccgggcataaagtcatatcgcctgaacagataacatctcactgactttgaaacgcgattttataatttgctgcccaaaaatacgtggcgctgaaaggcgcatttttgatgcaaatcatttattactgtgataacactgcgcgcgataaaaacattaaatatattcacatagtaaatatgttctattggaatggttgttttcgatatgacaaaagtctaaaaaacccattgatgtgaaaaggaataagaattgtctatattccgattcggtggaattaagtaatttctcggataaaaataagaaatgatattgatatttcttttttgatatggttcttatagcggctatggttattcaggaaacgatgcttgaatgcctggcgtaatagatttcaggtcagtagcgctattgtaaaatggattgttgatggcagaaggtatttagcaagaatccagttatagcagattgtcggtatttaatctggtatacagagacaccaacgaaatggctggaaaatggaacgttctttcattgttggcgttccgtccttgtcagcctgctttgccgcatgataatcacggaggggggatggacgccatctatttaaaactggacggtattgaaggcgaaagccggatcaaaggttttgaaaaccaaataaaacttattgcttacaaccacaacccgacaaaacgggagtccggcgaagcgagagggacatatattggagggttgacgctgacaaagccagtcgatcttgctacaccaggcctctatgagcactattgtaacgggaaaacggtgaaagaaggcgtgctgacattatgccgtcgtgataagggcgcaatgctgccatttattatttatacgctcaccaatgtgcgaatttcacgcatgagcaatcatggagacgccgaaggcagcgccacggagaccgtggatttggtttatagccatattcgctgggatattcccgcattagcgtcgaaaagcaaaacacggcggcctcttcaccgacaggcgctgtggcgatgaggacaaaacaagcttgcggactcgcagtgggcgatgctgtatagcgaaatggcatttagcggcttgcgaaggctgatgagcgctcatgtaaccaatcgattgcctgaaaaggcgataacgcgtggcccttacacccgttatgatttttacgcatagccgctaataaaacggcattttttatatacacatcaagttgatagtgtgtttctgaccttgacgtaaataagcgggaaaagcgatgaaacacaccattgggatactgggggggatgggacctgcggcaacggcggatatgttggaaaaatttgttgaattgcgacatgccagttgtgatcaacaacacatcccgctcattgtcagctctatccctgatattcccgatcgtacagcatgtctgttatccggcgggccttcgccataccgttatctggagcgttatctgcatatgctggaagacgccggggcggagtgtatcgttatcccatgcaacactgcgcattattggtttgatgatttacagaacgtcgcgaaagcgcgaatgatcagcatcctggacgctaccctgggggatattccgccatcggcgcggcacgttgggctgctggcgaccaatgcgacgctggcgaccgggttatatcaaaagaaagcgctggcgcgggggctgacgttaattcagccagaagacgcggggcaggcgttggtaatgcaggctatttatacgcttaaacgtggcgataaaactgcggcgcaagcgctgctgctgccgcaaatcgatagccttattgcccgtggcgctcaggcaattatcatggggtgtaccgaaattccgcttattgtggccggacatgaacgcgcgatagcgtgcccgatgattgattccacagcgtcgctggtgcgcgcggcgattcgttggtatgagtcctggccagacacccgcgcctctttgaccggggagcaacgccttaccgcctgaggtgtttacagcgcggcctgaagcccacgcaggtcgcgccaaaatgtttcggctacctgactcatgcgggtattcatgcgataagcataagcctggatcgggataaccagttcgtcggcatcaagcactatcaggcgcccgtcggtaatctcctgacggatagcatactcgggcaaccaggcgattccgcagccgtccatcgcaacctgttttaacaattcactcatcgaagagacgaaaaatgtactgaaactcagttcagcatggcgagtcagggtacgatttatcaatcggcccatataggagttctgactgtaattaagcaggggaaagtgcggctgctcaagcgtatagcgcggctcgccccggccattgttggcgcaaaccggaaacagtctcgactcaaacaggcggatattatcaaacggcgcttgttgcaggttttcatcgtgataagaaaagataaaatcgctttgcccctcacgtaacatatccaccgcctggtcgacatctatcgcctcaacggcgtaggtaaactgcgtaggcatctgcttaacgatggtcggcaacaggccgagggagagcgagtgggcggcggcaatcttgattttacgcagcgtataatcgctgccgccgcgcagttcggtcagattactttccagctgctgtaacaggtggcgaacctgggagtgaaagattttaccctgttcggaaagctgtagcggcgagacctgtcggttaaacagttcaacgcccacggcatgttccagggcgcgaatccgccggctaaaagcgggttgcgatacgttgcggataatggcggcctgagagaaattgcggcacttttccagcgtcagaaaatcatatagccattttgtctcaatattgtgcaaacctgctccagttacatccatttaccgttatcctgtcagccgcccgaaggggcattctacgtccattcgggcggctgacaaccgcttatcccatcctctttcagaatgccgtgatggggcagcctgaaactagcgggaattacgccggttcaaaggtaccttttacgcaggctttcccctcattgaccatgcgtttgccgcgcgcatacacctgctcaatgcgtaaatctgcgctaaagacgagcagatccgcatcgttaccgggacggatttcgcctttgccgtccagactgaggaaggcggctacgctggtcgtcagcggacgcagagcattggccaggctgaatccgtagtggttaaccagcgtctgcaacgtctccagcaaactttcgaagcccgcgacgccgatacccgtcagatttccggcagcgtcaaatagcggctggctgccgttaccgtctgaactgagcgtcacccgggaaagcgggacgccggcttttaccgctctggcaatgccctccgccggcgcgacgggatccggaatactggtggtaatgtcgatcacgccgcctttaagcgcaaacgccagcgcctgctcgaaaagagattcgctacggttgacgtgggtaggcagcagtttaccgatcggcacgtcgctgttttccaggatgtcatacagcggctgtaacccttttttgctgctgcccatatgaaaaacgctgacaccaggtttgccccccagcaggccgccaacgcgtgattcggcggccatgctggcgagttgattcccgctgggcgcggcggaacggtggtcggagactgcgcatttcacgccaatgacgcggtcgatcagcgcgacgtctttttctaccgagccagtaatggtcggcgacggaacgtgataagcgcccgtgagcatccaggcggtgatcccctcctcatttagcgctcgcgttttggctaacagcgacgcgggatgacggctgacggagtcggtgccaagcaggccgacgaccgttgttatcccggcttccgtcaggcggctcagagagacttccggcgtccgcgtcgtcggccccgcttcgccgccgccgccgatcagatgaacgtgttggtcgataaagcccgggcacagcatacggccgctaagattaatcaccgtacagtccggtacgatatcgccggggatgccagcgccgacggcaataattttgccattcgcgagtagaacatcgcagatgccccggtcttctggcgcaaacaggtgcgcaccctgtaataaggtaaactccgcggcggataaatcaggcatgataactccttattaaacaataagctgcatgacccagatcgacagcagcgcattgatggcgcagactgcgataatatgcgggtaatatttggcgttgacttcggcagtaccgagacagcggccgacattctgtaccgggtttcccatcaggtaaatggctggcagtagtacggtaacatcgtggccgcttagcgcgccggcggtagccagactggccgccacgccaacggcgccgcccatactcatcagcgaagccagaagcaccgtagccgcttcgccgggaagcccccacaacgccatcacgggctggcagatatggcctacccagtcgagcagaccggtaattttcagcgcctgaataatgacaaatgccatgaccacattgggtaacaggttggtcgtggcgatggtaaaaccgcggcgtgcgccatcgataaacatatccatgacattcttacgtacctgagtcgtcatgattgggctccttgcgcagggtgacggcgttcttcgatgttaatccagatgcgcaaaaggtttgcgccgataaatttgaatagcagaatgaccaccagcggaatgatgactgacgttcccagaaaggcgaataccgcaacgccggaggagaaatagttggtgataatagcgctgccgctggtctgccaggcggcaaaaatcactttatcgcgttcagtgatttcgccttcctgcgccagttctttggtcatacccgccgcggcgtcggtattttgcaggttggcgatcagcgccagtgagcaaatgccaggaatgccaagcaacggtttcaggatgggcgtcatcagttgctgcgccgcccgcagaccgcccagtccatccgtaatcgcgatgatacccagagaaaggataaccgacggtgccagctccagcgcaaaaaggaagccatctttcgcgcccgttccgcccgcgccacgaaaggtctgcgtaccggtcacatgaccgaatgacccgttgagtacggtaaaatcaaaaacgcgccaccagccttcgcttccggaaaatacgccggaaaagaaaataatggtgagaaaaaacgccaggtatccctttatcccgaccttttctgtatcaagcggcatggccgccccgtccacttgttgcgccatagcgatccccgaatttttttgatgatgtgttggttgtagccacaggccaaaaagcccgaaacagaaagaccttatcagccataagggtaaggacaaaatgcaagtatgtatcgtgctatgcgtttcttgcatagcagcgcgaaaaatcaccatcctcgctactgccggaggcgcggggaaccgtggacggtataacgcgaggtaaaaaagcaaagaaacaggtgttgacgcaggccggagctgggagcaggaaaaaaggagaaataaatttgacgttagtcaatttcacgccacttaattatcgttgttaaaaaataggattttttaacctaaattttacttttttactgtaatttttcacgccttaagaggaattgtcacggtcaggtcagtagccgctgataggtcagcttgcgccctaagaatcctacgggcaggtaataaaaaacgaataatcgaattaatttcatgatgtgatttatttataattgtgatgatttgagagggagcgataatcatcataatggaatatatagccaaaataattcgagttgcttaaaggcggcaagggagtgagtccccaggagcatagataacgatgtgactggggtgagcaacggcccgtcagggcgaggcccatggatgggccgggtaatccgtagccaacacataagccacttgaagtaggaagggtatataaaataataggcagattaataacactaaaaaccatagaataagtatagtttttagtggcatctttaccttgaaataacgtgttgaggatgtgctattaaaaacagatcctcattgcgccgcgaatagcattaaagatacaacccggtgcggagagcgtgggtttactctaccgcttattcacgtatcacaaaccgtttttgttttatctgctgcacagcgctgatcagcgcggcaaaaaagagcgccgcggcgccgcaaagcgtggcgttgataattgccgacgcgccattgcctgacagactggcggcgagcggaccgagaatttgcccaataccatacgttagcgtcaccaggcctaacaaattaatattacccggcgcgctgagttgtcgggcaagcggcatcaccagcgaggttgtgcccataaacgtggcgccaaaaccaatactgctcagtattaacagcaacaacgagtcgctggcgagagacagcagcacgcaggcgctctggatcaacaggttcgcggtcaggcatggcaggacgccccaatgttttgccgcccacagccagccgaagcagccgggaatgatcgccaggccgaccaacgaccaaaggtgcgccgtgagtagcggagagcccgcgcttttcgccatcagcggcaaataggtagcgacaatgatgtagccgaatccggcgaaaccgtacaacagcgccagttgccaccagggcataggctgattttcgattcttgctaagggcgcaggcggcagcgcatgagcgcgggggggaatcaatattgccacgattaatagcaatataccggcgagcgccccggcccccagccatagcgaatgggccgaaagcgcataatgtaaaccgccaatgacatattcgttgcccagtgcaatcccggccccgacgccggaaaagagcgcggcgatcacaaacggatggcgggtatgatgcaacacaatcattgatccaaaaatcatcattcccgcgctcgcgacgcctgccaggaagcgcaccaacatgacgaccgcgggttgggtaaatatcgccatggccagaataagaataccggtggcgaccgccgaagccagcagcatggggcgtagacgagaggggagatgaaaaaggccaaaggaaaacagtaagcttcccgccaggtaccctgcataattggcgctggcaatccaggagagttggttaaacgttagctgcttttccgccagcattaccggcagcatgggcgtatacagaaagcggccaactcccatccccagcgtcaataccatcataccgaaaagcgccgtaaaaatgggatggcgaggtgaagcgctctgagcatgaaccatggtttttctctttgctaaagtaaggcaagaatgcctgattgttgttgcaaatgataataaaaagtaaaattaatgtttcaaatttgcaagaaaagaaagtgaagcgcaggcgaataacggattgagaagaggggcatcggtgggaaatggcattaaattaatgcctcccacgtgcggggtttggcagttaatctgaacgagaattgcgccttccccttcttagatactgagcagtgccggtatttgcgacagtaaatataacaccagaccgatagcgccgccgaccagcgtgccgttcacgcggataaactgcaaatctttaccgatattaagctcaatctgctgcgacatatcgcgcgcatcccagccttttacggtatcgctgatgtggcgcgtcaggaaggcggcgaattccggcgcgacgcggtgcgcggcctgttccagatgaccgttaagcgaagcgcgtaatgcgtcgtcggcgatcagcgtctcgccaaaccattgtccggcatgagcgatgcgctgcttcacctttgagtcttcggcgttgatatctgtttttaaccactggcgtagatccgcccagatttcgccgagataacggttaaacgcctcatcttccttcaggtaacttttaatgttttctgcccgggcagccatttccggatcatgtttaagtttatcgatcagcttatacgtcgcgcgatcgaaggcatgacgaatctgatgcgcgcggtcgtgactgatatcatccagcagagaattcaccgcgtcggagaccagttcagcgctgtgttctcccagccattcggtcggcagaatcttcgcttttaacggatgttcggtctccagccagcgtatgatctgtctggcgataaatgttcgggagctgtcacgctgtaacagggcgataagctgggcgatcagcgtatcgagtaacacctggtgacgatcgtttttggtcatgctttccagcatcagggcgctggtgccggaaagatccactttatcaatcgccttatgtaccgctcgcttgagcagccgctgaatacgggcgtcatcggttagttccagaaagccgctcataatttgcagcagatgctgcccgacccggctggcgttgtccggctggctgaaccagtttccgataagcagcgcgggttcatggcggcggattagcgcgatcagcgactgcgtatcaaggaacttctcctgcacaaattgcccaagattttcgccgattcggtctttattacggggaataatcgccgtatgtcgtgaaataaacggaatgggaatgcggcgaaacagcgccaccacggcaaaccagtccgccagcgcgccaaccatcgccgcttcggcaatagcttttgcgcccagcacccaaaaactgggcggcaggaaaagcgtggtcacaaacgtcgcggcggctatcagcaacagtgagagcgccaggcgtttggcgcgtttgagttcggcgattttattcatagggttaaggatagagccagacggcaggaacgtgcaaaaaacatcagattatcctgtgccggataagcctctatccggcagagtgtttacttctcagcggccagttctgccgcctcatgctggcgcacgcgctgtaatagtgtcgccagagtgaagaccacaatcaccccggccaccgctgccagcaggtgaaacggcagtctcccgccgtgaaaccacagccagcggccaacttcgaccgacaccgccatcaccgtcagaatcaccatgttcagcgaggccgaaaccgtcccttttggcaagttgttggaaaaaagcgtgaagcgaaacagcgtcgggaaaatcatgccaatgccgaacgcgtacaggctggtgcccagcacagaccaaagccagacgtgcggcagaagaagattaccgaggagtaatgtcgccagcccgcttaactggattggtacggcgcgccagataaaacgcggtcgggtcggatctttcaccaggcgcacaacgatcatattggccacgatcaccgcgccgaatacgggcacctgcgcccaggcgaattgcgaagtactcatcccgccagcatcgatcaggatcaccggcgacaccgccacccagctcatcatcgggatgtagctcaacgacagcgtcgccgccccggtgagaaaaatcgggttgcgaaacacattacgaaaatcgcgcagtacgctcaccgcgctgaacggcaccgcgccgcgttgcaccgtttccggcatcgccagcagcaggccgcacaacgccaacagtcccatcaccgcaataataccgaacagcaccttccagtgaacgaagtgcatcagcgcggcgccggagagcgggccgataaccggagcgaccagcacaatggaggtaataatcgccatcagcttaatggctttggtttgaccgaaggcctcctgtaccgtgacgtagccgaccgttgcgataaagcaaatgctggtgccctgcacaaaacgggcaaccagaaactgcgtcattgaggtcgtcaacagcgttgccgcgcaggcgagagtaaaaattaatgcccctgcaatcagcactggccggcggccaatcctgtcggatagcggccccagaagccattgcaacgccattccgcccgccagatagagactgaccgaggccggcgcaagactgacgtcagcattaaaatcgcgcacgacgttaatgatgccaggctgaatcagatccgtcgtcagataggcggcaaaatcgtacaaaatcagcgccatcgggaaaaataacgttgtggcgcgttgggagaaaaactgaataatccgttgcataaaaaatgcgctccatgtcggagaaccccatgatgggatagcgaaactcaataccgtcatcgtgacgtcaggcaggcgatagaaacagcggctgcggatgtactgaatttcatgtaatcaaaaacgctgccggtgaaaacacagacaggaagagacgcgttctgaatctcgtcagaacgtgtggcgattacagataacaatcagcacatcacacctcgggaaatttacgttgcacggaaaatatacacattaagtgtaattaaattttgatgttaatcaaaagagtttgtctggttaataaagataaaggcagggtgcgcaggctggtattttgcgtgctcagttccgaaaatgcatgtgcattacagataacaggatttatcttccgtcgcgcctcgcaatgctgaaaaggtacggatgagaaaggaattttcaggaggtagagtcgcagcatcctggtttggggggacggagcgccatgaaaaaatcgacgacctcaacaccgcatgatgcggtgtttaaaacctttttgcgccacccggaaaccgcccgcgattttatggagattcatctgccggtgtcgttacgccagctttgcgacctgctgggactggttgaacgaattgcttcgctgttagttactggttgcgctaatgacaggcagcttaaagcgctgtttaattatcttatgattcagcacggacatacgcctcgtttcaccacgtttattcgtgatgtggtagggcatgtcccgcacactaaggagagactgatgacgctgatagagaggatccgcgcagcggatcgcagaaaaggggaacggcaaggaagacaggttggtctggaggaagggctggaaaaagggctggaaaaaggtcagcgcgttgccgcattgcgtatcgccaaacagatgctggcggacggacttgaccgcgagactgtccagcggttcaccggccttacggctgaagagcttcaggatgttagccactaacgcggttccagtctgaatgttgcaggcccggtgcccgccgggcaacgctctctataattatcgctgataacctcacgaatataccgaactttaccgatagcgccagccatctctactacccttattgttctgagcggcatttacggctgccttaatgacgataacaaggagacatgtgatatggcttaccagacagtgaatcctgccaataatcagctcattaaagagtaccccccgcacacggacgcggatattgaagccgcgctgcaaaaagctgacgcgctctatcactccgattggtccaaaggagagattgaccaacgtctgccggtactgcataagctggctgacttgatcgacagccgtgttgaagaactggcaaaaatcgccagccaggagatgggcaagctcatcgagcagagccgtggcgaagtcaaactgtgtgcgcagatcgctcgctattatgcggataaagcgaagcagtttcttgccccggtgccttataaaaccgagtttggcgacgcgtgggtagaacatcatccgattggcgtcatcatggctgttgagccgtggaacttcccgtactatcagttgatgcgtgtgctggcgccgaacctggccgcaggtaacccggtgctggcgaaacatgccagcatcgtaccgcactgcgccgagacgtttgcccatctggtgcgtgaagccggcgcgccggaaggcgcatggaccaacctgtttatttcctccgatcaggtggcgaacatcatcgccgacccgcgcgtgcagggcgcggcgctcaccggatctgaaaaagcggggagcgccgtggcggcacaggcggcgaagcacattaaaaaatcgacgctggaactgggcgggaacgatgtgttcgtcgtgctggacgatgccgatcttgagaaagcggtgaaaattggcgtgcaggcacggctcactaatgcggggcaggtatgtacggcggcgaagcgctttatcctgcatgagaaaatcgccgatcaattcctcagccagttcaccgaggcgttcaggaaggtgaaggtgggggatcagatggacgcttctaccgaactggggccgctgtcgtcgaaagatgcgctggaaacattgaccagacaggtcgaggaagcggtgaaaaatggcgcgacgctgcacgttggtggcaagccgctggaaagcaaaggcaacttctttgagccgaccattctgacccatattacgcgtgacaacccggcgtactttgaagagttcttcggcccggtggcgcagatgtatgtggtgaaagacgatgacgaggcggtaaaactcgccaacgattcccactacggcctgggcggtgcggtgtttagtcagaatatcgaacgcgctaaacgcatggcctcccggattgaaaccgggatggtttatatcaactggctgaccgacaccgcagcggagctgccgttcggcggcgttaagcgttcgggcttcggacgcgagctatcggatctggggattaaggagtttgtgaaccagaagctggtagtggtgcgccgctaatccctgttgcccctctgaaatcgggaggggcctggctttttgcagcgaaggacgcggatcttaaatcagaacgaaataagcgaacaaaaccccctcaattgccctccttatttatccacgttgcactaaccgtgctttttatcccggtattgtttgtacagacattcatgatgcccgcattttctgttctatgcggaggccggtatggaattttacgagaaccgccccagacaaccattcattggctttgtgcagctcagacgggcgctaaaaaggtggtggctgcgtaagcgggcctgtcaggcgctgcgacgaatgagtgacgagcagttaagggatatcgggttggaaaggaaggatgtggaatagtgaatctattcaagggcaatagtaattaaaggattttatgatatattactatgcccttatgttatgcgtgctcactattttatatcatttatattaatatcattaatctttttctcaatgtatttttctggttttattttggttttttgctcaatcgcatgatatttttccttatcaatggttatagtcattttttcttttttgttaaatatgccagggatgataatcgctgctgcaattatcaataatattattattgctgcatgaattttgtgtttgggaaatgcttttaatagagtacacaggattgttatacccttatgtataagataaggaaaagatagaaataaaacaaatgggcaagcaaaatttatgacatgtttcccatagtaattattatttattgttagcgaatcaatacagaatgccatcacacaaaatagaaatattccgaagcataagaaggatataatgaaagaaccttgcataattcttttatgcaactcttgcaaaatactatttgtgatcttttccagtttagtgttatgacaaataactaccaacatcgcaaaaaaaatctcagataaagcaagcgaaaataacgtattgaaggccatgtagctcatcagcgtttcgaaaaatatactttgctgaagatagtatggtaatagagcgttgacctccataaaaaaagtacatagaaatccaagggcgacataagcaattaaaccttcatttctccaaagcgtaatgttttcttttacttttagccgcatgattttccttcactcattgatatgaattataattaaagctggcaagggttctttgccagcttattttatgcgtttacttagaacctgccatcacgtcgataaacgcctgcacctgcttttgcttacgcgccgatagcttgctcacctggcgcagcgactgcatcaactcgctttcttctggttgcggctgctgtgccgtcagcacaatacagccgttcatcaccctcacatccacctcggtaccggtggcgaaaccggcggcttccagccactggcccttcatggtgagggcgggaatgcgggtataatccggataacgactcgcataactcacggtaaggtgacggttatttgttggggagacttctggatcgcacggatctgcaatagaatggacggtagtcatgatggctattccctaaaatagtgattgtgatgagcgatatggccgtgttcccgcacggccatatcgcgctaaatacctgtacataacatcagtaaataaaagaaaagtccagctgaaaatagactgtaatgggaatgttcaggaataaactggatatatttttgatggttatgattgcggggaaataataaaaagcgcaccgggaaggtgcgcttgaaaataaaggtcaggcttttttacgcgaggtttttttaccgccgctggcggcgcgttcggccttaattttttccagcagggcggcggcgctgttttcaccgctgataagttcagggttttccgcacgccactgggcggtcagctcgccgcggaaggccttcgccaggatcgactgggtgaggctgttgacgcgggtcagggcgttgttgacctgcttttcaatggtgtcggcgtaggcgaagagttgttcgacgcggcggacgatttcgtgttgttcttggagtggtggtagtatcaatgggagtgattttatccttgccaaagccaacttcccttgagctcctgattttatttctgaattgataatatcctgaagataactacttctcagccataaagaaagaaatctattgaaaatattttcgtttaaattacatatcttggcagcattttcagttaaatttgcattattataaacatctggaattataccagcatcaccaatacatgcaccaacaatagttatataaagatctccagatgagactgtatatctagaaatacttttttgtatatattcttctaagtatagttgtccttcaggaagaacagttccattttttagctgccctgctctaatatatggaaaccctgtattctcagctattaatgattcacctttaggtaatctcttgccacctttgacatcagcaaattgaccaatctcactgattttccataaagatggaatagaaatattcaattctgttaacttgaatttattttttttatgaagttcttttgtcagttgcccgtttactgctgcaactatcactgattggcgaaaacgtttcaggatttgtgggatttgctcaagacgtgctttggtgctgtctacctgcgccagcagcgtatcgagtttttcggcgatgactttttgttcggcaagaggtgggacaggaacaccatagttctcaagaaattctttagtaacacgtttatgtccgactgaaccggacatattaagtgctccattagttaaaaaatctttagttttaactaaagcaaacaaccaatggggattaattaacccattaatagaccgaagaacataatattcagtgctaccggcaccatagccgttagggaattctttgattacaacagcttttccattttcgaagcatggcgtgattttggcaaaaataacatcatcgttctgaaattgagtaaatcctttttttacttcactccactttttggtttcaaagttacatttacctaaataggttgttggaacaccggccatcggcataaatccaacatctaaatcatcatcaagtttaagtttgggattgaggttgcacatttcattgattgtgcttgtagcccacccctccggcaatttccccccactcatgccttcacctcgccaaacgcttcattcagcaactgacgctgagcatccgcttcatcgcccgcgcccagctcgcgcatcagcgcatccagttcgcccagcgcctgtaccagctcgcccatcgcttctgccgccagcacgtccggctccggcagactgtcggcgtcgatgctgtctttatccttcagccaggagatatccagcgaatcggattttgcgctgcggatccactcgcggctgaacttgcgccagcggctggtggcctggtgctggtcagtgttcttgttctcttcgctgtcggcgacttcgctctcttcggcgttaaagctccactccccttcttcacgcggacttaagccgtgtggatcttcgccgtagacagtttcaaacggctgcagatgctgctcggtaaacggcgtgcgcttgccgaagctcggcatattggtccgcaggtcatacacccacacgtcatcggtgcagtttttatcctgatgcggattggtgaccgtgcctttggtaaagaacagcacgttggttttgacgccctgggcgtaaaagataccggtcggcagacgcaggatggtgtgcagatggcatttgtccatcaggtcgcgacgaatatcggtgcccttaccgccttcaaacagcacgttatccggcaccaccaccgccgcgcggccgccggggtgcagggtttcaataatatgctgcataaagcacagctgtttgttgctggtcgggtgcacgaaggtacgggtaatgttggtgcccgcggcgctgccaaacggcgggttggtggcgacgatatgtgccttcggcaggttttcaccgtcgctgcccagcgtgttgcccagacggatagcgccgccgtggtcgaggttgccttcaatatcgtgcagcagacagttcatcagcgccagacggcgggtgccgggcaccagttcgaggccgataaacgcgcggtggatctggaaatcctgagtgtcgccatcaaggtcatccagatcgttagtctgtgatttcacgtaacggtcagcttcaatcaaaaagcccgccgtacccgccgccgggtcctgcaccacttcacgcggctgcggtttcagcagatggataatggttttgatcagcgggcgtggggtgaagtactggcccgcgccagatttggtttcgttggcgttcttctgcagcagcccttcgtacatatcgccgaagtcgtcgcgggatttcccgtggttgccattgtaccagtccagcgcatccatatagctgaccagctcagtcagctgtttgggttgctcaatggtggtgctgacattatggaataccgcctgcaccagctttttctcatctgagcctaactgaaccagcaggttgcggtagaactgcatctgatcctggccaatacgcgatttcaggtcatcccagcggtagccttccggcaggtagtccgcttcctggccggtctctttgcacattttcaaaaacagcagcgaggcgagttcattgacgtagttttgataggagacgccgccgtcacgcaggttgtcgcacagtttccacagcttggcgaccagatcgttattgttcattgaagatcctatttgacatggcgaccaccattgtgggtcgcaaaagtgattgagcgtttcagatgcctgatggcgcttcgcttatcaggcctacagggttaggtgtaggccggataaggcatcgccgccatccggcgaaaacggggatgataccctcttaagccagttcgtcccagatgtaatcgctgaacttatccagcacgctgtcgaggttgtcatcaaaggtgcgctgtaacattggcttaccgcctcgacggtggaaattgccggttttgaagacgtcgtcgtcgagcaccactttctctttcagcgcctgcgctaaacggtcgagccagtttatctgctcgtcgctccagtcgttctcggccttgatacgcgccagcgcgtgatcgacacgctcgtcaaacggtttgagcgcatcgcccaccgccgcgcggcggatatggccgatcaggcgggcggcaatatcttcgttgcgcgtcgctttccacgcgctgcgcagggacgactcttcaaaatgctggcggtcaaaccactcctgcaattccaccagccctttacgggtgaggtcacgcgggcgattgatcaccgcctgcaacgcgggctgggcgttcggggcgtgctgcaccagcgcatcgaacgcttcgaggaaatcctgcggtgtgtcgtagtcgccgtacagcgatttgacgcttaccacctcatcgtcaatatcgaggaaaatgggggcctcacgcagggcgttgatatcggttgtcagcctttcgagacgggcgataaagccgggaagcttattgaaaatctcggcgctccagtgcggccctttttcccgcaggcgcgaagccagaccaccaaagttaacgcccgcggcatccaggcacagttcgtccagacggcggacctgcttatctaccgcttcgctgcgatcgcggttatagatggcaagaccgataatccgctgcagcttagcgaccagctgttcatggctgtgttcggcaaaactgcggccatccgcttcgatggttttgtaggtttctgagtcggtaatttcgttgaccagcgtttgcagctccacctgcggacgcacaaccaccgggcgcatggtatcgacgctttccagcgagctgtagatatccacgcagtcgaaaatcttaaagctggttttccctactgacggacacagacgcgtggcgcggcccttcatctgctcgtagagaatgcggcttttgactttgcgcaggaacacaatattacagatagacgggatatccacgccggtggtcagcaggtcgacggtgactacgatattgggcagccgctctttgttaaagcggacgatcatgctttgcactttcttcgcgtctttatcggcatcaccggtgatcttgatgatcgcgtcgtgctcaagctgcggatactttttcttaaacgcgctacgcagctcgtcaaccaccatatcggcatgggcgttggtgacgcagaacaccagcgttttttgctgcccggtgggatccaggtatttggtgagctcgccgcataccgcgcggttaaacgccgggatcaccaggccacggttaaaatcggcgacctcaaaatcctgatcgtcggccagcgtgtcgttgatcagctcgccctgtgggttcaggcgttccacctgttcaccctcggaaagatagaccccgtcctgtgcgttgcgggtgacgatctgaatagggggatcctgatcgatcaggtaaccgtcgattaccgccgtacggtaggtgtagcggtaaaccggctcgccgaaaatatccaccgtgtgcagcgctggcgtggcggtcagggcgatttttaccgcgtcgaaatgatcgagaatgcgacggtaggcggaaacgtaatccagctggctacggaactgcagctcgccttcggtctgctctttatcgagaatgtagccacggtgcgcttcatcgaccacgatacagtcgtagcggccaaccggcatcggttcatcggattgcagcgtgcgcttgaccagtgactgcaccgtggcgacgtgaattttggtgctgtcttccgggaatttgtcggttaaccctttgatatcaaaaatgctgttaaaggtgtcgccgttaatgcgcgtgtcttcaaacgcccccagcgcctgttcgccgagcgagcgacggtcaaccaggaacagcacgcgtttgaaacgctgcgactggatcaggcggaacattaaagcaatggcggtacgggttttaccggtaccggtcgccattgccagcaggatgtgttgctgaccgtttacgatagcctgttccaccgcgcggacggcatcttcctggtaatagcgcaggccgagttcgctcattccgggattttcggcaaaccactgattttgtttctgcggatcgctgcccagcatatccagcagctcttccgggcgatgccattccggcagcgctttcgacatgttggtggtgtggcggacgtcgcgataccagataccgctcttggtcttcatcgccgcgcggtattcgcgcccgttggtggagtagcagaaggggattttaaagcgctgtttaccgctggtgtcctgccagctgatttcatactccggcacggcgtcatgcacttcgtcgggagcgtagtgctccagcagcgtgtcgcgtaaaaatccgttatcgaagtatttactgtagcggtaagactcgttgagcttgctggagacatcggtatttttgcgtttcgcttcaacgacggcgatgggcttcaggccaatgaacaatacgtaatcggcaaagcctgtttttcccgtttcatctgtacctgttggccattcggcaatcgctttattgacgccgggttccgggcgagcgcctttggcaaagcgtaacgttttgctatctgcctgccagcccgctttacgcaactgggcgtcgatcaggaagcgactctcttcttcattgagttccaacgtgcgtttgacagcctggtcggtgatttctttatgataggccttacgttcctgttcggtttgcttcgccagttcggcatcttttgctgcaagctgtgcctccagcgcggccagacgcgctttggtctgggcttcggtttcctgctgtttgccctcaaggatggcaatgtagccgttgagcgcaaccagtctttgctgctgagcttccagttcggcctggctttgtactttctcttgcgcctgacgttccagctgttgtttcagcgtcagcacttcctggtgataaagattctcgccgtgttctggcagaacaaacatcggcaccgggaaatcgtaatctttggtcaccagccggtagtaccagacgctgaggcggaacccgagccgcaggcacatctgggcatcgtccagatcgttatgaaattcgtggacggccaggttaccgatacggcgcagcttatggaaaacagaaaggatgctgtcatcaataaacgcaatcttgcccagttcgcgcagcaggtcatgctggttttcgcaggccggtatatccagcaactggccgagatgtttcgcggtggcttcgccaaacatgcgcatttttatcagagtggtattaggatcgtccggatagttgttttccgccgcgcaggcgatggcgtaaatgaagtcgttgacgcctttgagaaagtcgaagttagatttgttcatttttatctatccggttcctgagcgggaagacgttattaccctgtgccgtaaagggaaaataacagacccatggtagacttcatattgtgtgtgatcaacgaacaatcagagagtaactgcttctttcctaatgttttcctgaagagtatcgttctccggcggggtatctaatctatatcaatagcagggatggatttatggctgttccaacatatgacaaatttattgaaccagtgttgcgttttctggccactcgacccgagggcgctttggtcagagaagtgcgtgaagctgcagccgaaatgcttgggttagatgagcagcagcgtgcagaggtgattaccagtggacaactgacgtaccagaaccgcaccggttgggcgcacgatcgtctcaaacgcgccgggttatcgcagagcctatcccggggaaaatggtgtttaacaccagcgggaatgagctgggttgcctcgcatccgcagccgatgaccgagctggaagtgagtcattttgcttgtgattttaacggcgtaaagctcagtaagctggcagatgcggtggcgttagatccacagccagaatcgattgaggatgatgagcttgccagaagcagcccggacgatcgcctggagcaagcgctcaatgagattcgtgaatctgttgccgaagaattgctggagaacctgcttcaggtttcgccggcgcgttttgaagtgattgtgttagatgtgttgcaccgcctgggatatggcggccatcgcggtgatttgcagcgcgtagggggaaccggcgatggcggcattgacggtattatctctctcgataagctcgggctggaaaaagtctacgttcaggccaaacgctggaaaggcaccgtcgggagcgctgaagtcaggggcttttatggcgcattgcctgagcaaaaagtgaaacgtggcgtctttattaccacctcaggttttacggcgcatgccagagactatgctaacaaagttgaaggtctggtgctggtggatggcgacaggctggtgcatctgatgattgataatgatattggcgtatcctcacgtttactcaagttgccaaagctcgatatggattactttgagtagtggtaacgctggaacctgattgcgggtaattgagatggaccacgttgtgggcacctgtgtttcctctcgcccagaaatcacgtgactttctatggctgcgtatcagcctaaacccatgccggatagcggctgcgccttctgcggcctactcttctggtcaatttccttttatctcgaatacacaaattgtgaagctatttccaacaatccaggtataatcgtaagataattgtatatacatttttgtatgtacaattagggaaaacacatgccgatggagtttgaatgggatgcgaacaaggctaaaagcaacctgaggaagcacggtgtccgttttgaggatgcggtactggtgtttgacgatccccgacacctgtcacgtcaggagcgttatgagaatggagaatatcgttggcagaccctcggccttgttcatggcattgtggtcattctggttgctcatagcgttcggttcgaaagtggttttgaagttatccgtatcatcagcgcccgcaaggcagacagaaaagagaggaatcgttatgagcatggttaaacataaacgcggcaacgcatccgcgctgagtgctcagcatgaggctgaactgaaggcgctggcgaaaaaatcagatgatgagattgattacagcgacattcccgcttcggaggatgggcagtggtctgaagcagtgcgtggtaagttttttcgcccgttaaaaactcaggcctcggtgcgtattgacgccgatgtgatggagtggctgaaacggccaggaaaaggctaccagacgcggctcaatgccattctgcgcgaggcgatgctgcgcgagcaaaataagaaatagcccgaagatgccggatggcggctgcgccttatccggcctacaaattcccgccaggccagataagcgcttaatggttacttccttaaccccacaaatgccgctctgatctcgtcttccggcaactggatcccgataaataccagcgtgctgtgcggcgtttcgtcgccccacggtctgtcccagtcggcgctgtagaggcgctgcacgccctggaacagcaggcggttgggttcgccgtcgatccacagcatccctttgtaacgcagcagtttatccgctgattccagcagcaggttttccatcacccgcgacacctcgctgatatccaccgggtaatccagttccaccacaattgacgatacatcgttctgtttatcggcaataaagtggaaacgcggttggcttgccagcacgttctcttccagcataaagccgctggtattaaacaactgactcaggtcaatatcgccgtgtaccacggtgtaaaccggggcgcgggcgttgatacgcgccagccgctcgcgcagtttctcgctgtcgcctgccacgtcggttttggtcaacagaatgcggtcggcgtagcctatctgcgactgggctatggtgaactgattcatctgctcgttagcgtgcaccgcgtcgaccagcgcaatcacgccgtctaacaggtagcgttcgcataatacgtcatgggagaaaaaggtctgaataatcgggccggggtcagccatgccggtgcattcaatcaccaggcggtcgaaagcaatatcgccgcggtcgcggctgtcgagcaggtctaatagcgcatcttccagctcgttggagcgggtacagcagatgcagccgttagtcagggttttgatctgtgtggcgcgatcgccaatcagttgatcgtcaacggagacttcgccaaattcgttttcgataacggcgattttaaaaccatgttgttcgttgaggatatggcgtagtagggtggttttgccggcaccaagaaaaccggtaagtagggtaactgcaatcggggtcatagtctctccattaacaacagcgcataccgcctttgccatcgccgccgtaacgtgcttgctgacgttcgcggaagaactcttcataggtcatgtacggcttgtcgggatggttggttttcatgtgctcgacatagttgtcgtagtccggaataccaatcaacatttttgccgcctggccgagatatttttttgcctgacctaaagtatcaaacattctgccgtcctgttaatgaataaagccggatggcggcttgcgccttatccggcctacactagccggggtcgctgtgcgctacccggcatcagttttagtggtgtgaagagatcttcacgccgccttccggcacaggcacatacggggtttctttgtcggtacgtttatcgctgttgcgtaccttcatccaggtggtgaaaccgtagaagataatactgtacaccaccaccaggaacagaatactcaaaccagcgttagtgtagttgttcaccacgatatggttcatgttggcaatctgctgctcggtcaggttggcgccgttggcaatcttctctttatacaggtttgccatgtagaagaaaccttccatctgtgggttggcgctgaacagtttcaggcccagcgcccaggtggtgcagatcagcagccataccgccggaattaccgtcacccagatgtatttggtgcgctgcattttgatcagtaccacggtgctcaacaccagcgccacggcggccagcatctggttagagataccgaacaacggccacaggctcttcacgccgcccagcgggtcgaccacgccctgatacagcagatagccccacaaaccgacgcagcctgcggtaccgatgatacccgcgaccagagaatcggtttttttcaggaacgggacgaagttacccagcaaatcctgcaacataaagcggccggaacgggtacccgcatccagcgcggtcaggataaacagcgcttcgaacagaataccgaagtgataccagaagcccatatccgccatcggcaggactttgtggaacacatgcgcgatacctactgccagcgttggcgcgccgcctgcgcggttcaatactgacggttcaccgatatctttcgcagtttgcaggatttgttccggggaaatcacaaagccccaggagctgacggtcgccgctgcatgtgcggtaacgtctttcaactgcgccataatcagcggcgcgttctcgccgcccatctcgtgcaggtttggcatggtaatgcccagacctgccggcggggtgttcatcgcgaagtagagacccggttcaatgatcgaggccgccaccagcgccatcaccgcaacaaaggactccatcagcatcgcgccgtagccgataaaacgcgcatcggtctcacaggccagcagtttcggcgtggtgccggaggagatgagcgcgtggaagccagagacggcgccacaggcgatggtgatgaacaggaacgggaacagagcgcctttccacagcgggccggtaccgtcgacatactgcgtcaatgccggcatttttagttccgggttgaggatcacaatccccagcgccagaccgacgatcacgccgattttcaggaaggtagcgagatagtcgcgcggggcaaggatcagccataccggcagcagcgcggaaacaaaggcgtagccgatcagcgcgaaggtaatggtggtgtctttaaaggtcagcgccgggccccagtaagggtcgtgggcaatcacgccgccgaagtaaatagacgccaccagcagcacgataccaataacggagacttcgcctacgcgtcccggacgcaggaagcgcatgtagatgcccataaacagcgcaatcggcaccgtggagcagacggtgaagacgccccacgggctttcggccagcgctttaaccacgattaatgccagcaccgcgaggatgatgatcatgattaagaagcagccgaacagcgcgatggtgcctggaacggtacccatctcttctttgatcatctcgccaagagaggcgccgttacggcgggaagagatgaacagcaccataaagtcctgcactgcgcccgcgagcaccacgcccgccagtaaccacagtgtccccggcagatagcccatctgcgcggccaataccggcccgaccagcggacctgcgccagcgatggcggcgaagtggtgaccaaacagcacgtagcggttagtcggcacgtagttcaggccgtcgttattgataaccgccggcgtcgcgcgcgtcgggtcgagtttcatgaccttctgggcgatgtacaggctgtagtagcggtaagccaccagatagacggaaacggaagcgaccacgatccacagggcgctcacgtgttcaccccgacgtagggcaacgaccgagaggcagaaagcaccgatgattccgagaatcacccagggtatgtgcttgaatatctttttcgtatccatagtaaaacctggttgtaagtttaattatcagccgaagctgggtggacattgagttcgtgtttgaggaggtagattgactgctatgctgagaggatcttgccagatcatcgcgcgcgtaaagttaggtaaatcagtgagtggttgtatggcggtttaagcggtcggacgtaccggtaagcggtttcgcggaggagggcgtgggctattttatgtgattgagatcacgatataaaatgggacgatccttgttgcgcggggcgtcataacgacttcactgagctaatcgtgatattaatggcgcgcatcccataaagttttccctttccaggccgaaaattctgtatctgtctagcggaaagagaaaacatgttaaagcgaattaaaattgttaccagcttactgctggtattggcgctatttggccttttacaactgacatccggcgggctgttcttcaactcgctgaagaatgacaaagaaaacttcaccgtattgcaaactattcgtcagcagcagtctgccctgaatgcaacctgggtggagctgttgcaaacgcgtaataccctgaatcgcgcgggtatccgctggatgatggaccagagcaatattggcagcggcgcaactgtcgctgaactgatgcagggggcgaccaatacgctgaagctgaccgaaaaaaactgggagcagtatgaggcgttaccgcgcgatccacgtcagagtgaagcggctttccttgagatcaaacgaacctatgatatctaccacggcgcgttggcggagcttattcagcttcttggcgcgggtaagattaacgagttttttgatcaaccgactcaaagctatcaggacgcttttgagaagcagtacatggcctatatgcagcaaaacgatcgtctgtacgatattgctgttgaggataacaacagttcctacaaccaggcgatgtgggtactggtcagtgtgctgattgccgttctggtggtcattatcgccgtctggttcggcatcaaactgtcgcttatcgccccgatgaatcgtctgattgaaagcattcgtcatatcgccagcggcgatctggtgaagcgtatcgacgtggaaggctccaacgaaatggggcagttggctgaaaacctgcgtcatatgcaaagtgaactgatgcgtaccgtgggcgatgtacgtaacggcgcgaatgcgatctatagcggcgccagcgagattgcgatgggcaacaacgatctctcttcccgtactgagcagcaggcagcgtctctggaagagaccgccgccagtatggaacaactgaccgccaccgtgaaacagaacgccgaaaacgcccgtcaggccagtcacctggcgctgagtgcgtcagagacagcgcaaaaaggcggcaaagtggtggataacgtcgtacaaacaatgcgcgatatcgcctccagttcgcagaaaatcgccgatattatcagcgtaatcgacggtattgctttccagaccaatattctggcgctgaatgcggcggtagaagcggcgcgcgcaggcgagcagggacgcgggttcgcagtggtggccggtgaagtccgtaatctggcccagcgtagcgcgcaggcggcacgggagatcaagagtctgattgaggattccgtgagccgtgttgatgtaggttcgacgctggtcgaaagcgccggtgaaaccatggatgagatcgtcaatgcagtgacccgcgtgaccgatatcatgggcgagattgcctcggcgtctgacgagcaaagccgtggtatcgaccaggtgggcctggcggtagcggagatggatcgcgtaacgcagcagaacgcctcgctggtggaagagtccgccgccgcggctgcggcgctggaagagcaagccagccgtctgacccaggccgtcgcggtgttccgtattcaccagcaacagcagcgtgcgcgtgaagtggctgcggtaaaaaccccggcagccgtgtcgtcaccaaaggccgcagtggccgacggcagcgataattgggaaacattttaagggcgtagtggtgaacagtcggcctacagacgaccgtaggccggatgagatgttcacacttttgcctgatggcgtagcgcttaccaggcctggcagtccgcgcaggccgattttaaaccagcatcaggcgcatggtgcagcgtgattcatacgccaggccgtgcgccgcttcctcctctcttttctgatatcgcgcgctaatccaacgttgagtgaaggtgtgcggtgatccacaaaaaatgaataaagcgagagaacgcacggcaggagagccttgtttcgcggcatcataattgctgatgtgataatcgtgagaggatacgatgcgcaaagatgccctgcttgctttcctgatgaaccaaacggatttttttgatccggaaaatgtcagtgaggtgtttaccgcgcgctatctggcgcagcgttttaatatgcagcgcaataccgccagccattatctgaaccaactggtggcgcagggcgtgctctgcaaaatcaatacccgtcccgtctatttcctgcataagcaggcatttagccaacagttttttaccctttcgcgtaatgaatacgccagcgtcgcggagctgttagcgcacggggaacaggagtgcgcgccggacgatcacttttccctgttgattggccataacgaaagcctgaagcgcccgattgagcaactgaaaaccgcgctgttttatcccgacggcggactgccgctactgatgaccggcgaaagcggcaccgggaaaagttatctggcgcagctcatgcacgaatatgccatcgcccaggcgcttctgtcgccggatgcgccatttatcagttttaattgcgcccagtatgcgagcaatcccgaactgctggcggcgaatctttttggctatgtgaagggcgcgtttaccggcgcgcagagcgacagaccgggcgcgttcgaggcggctgacggcggcatgttatttctggatgaagtccaccggctgagcgccgaagggcaggagaagctctttacctggctcgatcgtggtgaaatttatcgggtaggcgacaccgcgcaggggcatccggtttcggtacgtctggtatttgcgacgaccgaagagatacacagtacctttctgacgacatttttgcgacgcatcccgattcaggtcaacctgccggatctccagcaccgtagccgccaggaaaaagaggcgctgatcttactgtttttctggacggaggcgaaaaaactttcggccacgcttatcctcaaaccgcgtttgttgcagatcctcaatcagtatgtttatcgcggcaacgtcggcgagctgaaaaatgtggtgaagtatgcggtggcgacggcatgggcgaaaaagcctgggcaggaaaccgttaccgtgtcgctgcacgatctgccggatgccatgctgtcggcattgccgtcactgaatgaaccgctggcggacgacacgccggtgagcatctcgcccgacacgaaccttacctggctgctgcgcgcccgcgacgagatgcagggcatgatccatgatacgcagtgtcatgtgctggcgctgtacgagctggtacgtagcgggaaagaggggtgggagacggtacaaaaaagaatgggcgatgaaattgagaccctcttcgatcgcctgatttttaccggcgacgataatgtgcactcacagcggttgctgttaattacaagccaggtgcgggaagagttttatcgtctggagaagcgcttcaatatgcagcttaacggcaactgtatttacgcgcttagccactatttaatccatcgtaccgcactggcgccttctcgtctcaacagcgagcagatccgccaactggacgccttcctcgcccagaaatatccgctgctgtacagcttctgtttacaaattctggagacgctgggccagaagctggatctggagccgagacgcattgatatgctgctgctggcgctttggctgcataaacagggggctaacaaccaaaaacaggtgacgcatgcggtgattctggcgcacggctatgccaccgccagcagtatcgccaacgtcgccaaccggttactgaaaaatacgatttttgaatcgttcgatatgccgctggacgtcacgccggaggcgatagcgcagcaggtgatgcgctatctggaagagcatccgctcgcctccggcctgatgattctggtggatatgggatcgctcaaggccattcatcgtcattttgatcgcgcgctttccacgccggtgacgattatcaacaacgtctcgaccagcatggccctgtatgtaggggagcgtattttacaggggcattttattgaagagatcgctcgcgatatcgcccgggatgtgccggtcgagtatcagctctactggccgaaaagcaacaaaccgcgcgccatactgaccacctgcgcgaccggtatcggtgtggcgacgaatctttgcgcattactgagcgccagtattccgcaggcgctggagattgacgtcgtcgcctgcgattatgcgatgctggcgagcaataaaacccaggagccggtatttatgcgctacgacgtactggcgatagtcggcacgctggacccgcacatcgccagcgtgccgtggatttcgctcgactcgctgatctccggcgaggggaatcactatctgatgcggctgtttggttcgctgaccacgccggagcaggtggcggagatcaacaacctgctgctgaaaaacttctcgctccgacgagtgatcgaatccgtcaccatcctcgacaccagcaaagtcatcaaccacgttgagcagtttctgctgcgctatgagcatctggcgggcgttaccgtctcgaatgaaagaaaggtggcgctctatgtgcatattagttgcctgattgagcgtctgatccgccatgcgggcattactgcctggagtgggcaacagtgtccggaacaggaactgaatcggctacgggaagcgtttagtgtcattgagagtaactacagtgtcaaaatccccaccgccgagcttggctatattcataatatcctgaccttcgaaacagaacttatcgagcaagatcaacagttttaactatttccctctgttaacccgcatcttttttcggcgcgccactttttctggcacgccgcttgctctcttttatcacagtggaatgtgttttagaggtcaggatgaagagacattatattttcgccagccacggcacgctggccagcggagttttaaactccgtggagctgattttaggcaaacggtcaaatgtctggacgctgtgcgcttacgttgaagagagcgtggatttaagccagcaggtagatacgctaattgcccggatcccgccggaagatgaaattattgcgctgaccgatatttttgccggcagcgtgaataacgaatttgtccgttatttatcacgggaaaattttcatctgctggcagggattaacctgccgctggttatcgatctctttatgtcggaaaacgatggcaataccacgcataccataatgacggcgttagcggattcaaaagaaaatattcagtactgcaatcaaactatcaccagcgccatgcaaagcgataaagatttttaaggggaggaagcgtcatgattgtttttttacgggtggatcatcgtttattacatggacaggtcgccttttcctggacgcagtacgttggcgcagactgtattttaattgccaacgacagcgtacctaatgatgacctgcgtaaaaccaccattaagatggcgaagccgcccgcggtgaagctggttattaaaaatattgccgattcaattgaagcgataaaaagcggcgttaccgataaatataaactttttattgttgttgaatccgtggcggatgcgtaccggctggcgcgcgaattacccgacattaaaagtattaatttaggcggcacgaaggtacgtgaagggagccagaatattgctaaagccatcaatctgttagcggatgaaatgactcaacttcgggagctggcggctggcggagtagagatagaaattcggctggtgcctaacgatcgtaaacaactttttgcctgagcggataccctcctgaggacatattatggtagaggcgcttttacttggactggtggcgtttatcgcccagtctgaatatgcattagggacgtcgctgatttccagacctatcgtgaccggacttttaaccggactggtgctgggcgacatggaaaccggaattgtgatgggcgcgacgctggagttggcgtttatcggttccttttcggtgggcgcgtcgctgcccccggatgtggtcactggcggtattttaggtgtggcctttgcgattaattccggcgctggggcggaaaccgcgctgttattaggtttgcctatcgcgacactggcgttaattgtgaaaaatatctataacggaatgtttattccgttgctctgtcataaagccgatgcttacgctgaggtgggggatacccggggcattgagcgtatgcatttaatctccggcattgggctgtcgctgatgctggggattatcgtcacggtctcttatttagcgggcgtgaatatggttaaaggttttctggatgccattccagaatttattaaacatggattaagcgttgccaccggtattattcccgcgctgggttttgccatgctggcgcgcttattaattaataaaaaggtcgccccctattttttcctcggttttgttttaatggcgtatttaaaaattccggtgacgggtattgcgattctcggcgcgatcgtcgccgtcgtgatggtcaatatgccgaaatttgcggcctcgcaaccggcacctgcgcaaggagcgtctcatgacgatgaagatgatttctgataaagaccgccagcaggcggaaaccactggtctggtcaccgcgcgtgatttacgccgcgtcttctggcggtcattccagatggagttttcctggaactatgaacgacaaatgaacctggcgttcgtctatacgctcattccggtattaaagaaactgtatagccgaaaagaagatcttgccgaagcgctaaaacgccatctggctttctttaataccacgccgcacattgtgacgttgatcctcggtattaccgtggcgatggaggagaaaaatagccagcagaaagagatggacgccagttctatcgataacgtcaaagcgtcgttaatggggccgctggcgggtattggcgactcttttttctggggaacattgcgtcttatcgccactggcatcggtaccagtctggcgctgaaaggcaatattctggggccgattttatttctgctggtgtttaacgtaccgcatattctggcccgctggttctttacccgctggggctatgtgctgggaaccggcgtactgcaacgcattcagcaaagcggaatgatggaaagcctaacctatggcgcctcgattatcggtctgatggtggttggcgcgatgacggcctccatgattgatatcaccattcccattacgtttggtacgggagaagcgaaaacccatgttcaggacattattaacgacatcatgccttgtctgctgccgttaattagcttcgccattgtgtactggctgttagggaaaaaagtgaaaccgttaaccatcattggcggtattgcgctggtgggaattttcggttcctggatagggttattttaagagggatacacaatgtcaccaaccatgctgacctatattaacgaagagtctgacgtcctggcgaatattattcgccgccatcgccagtctctggaagaagtatcgcggttcgccagccaaaaaacgttacgacgaatcctgatattagccaccggatcgtcattgaatgccgccttttgcgcccgttatttctttgagcgctgcggtatctctatcgatattaaagagccgtacacctttagccagtatgagaatagcgatccgcaagccgatatggttattgctatttcccagagcgggaaaagcgcttctaccctggaggcgatgcgtaaagttcaggcgcagggacgtccggtattcgctctgaccgccgatccgcaaagccctcttggcaaggccagtgattatccactggatattctgaccgggattgagtccgtcggctttgttacccgtggatttagcgcgacggtattgaatctgttgcttatcgcgttgttaattgcccgtcagcagcagcgactgacggaatcgcaggtcgaggagtatgtggcgcagcttcaacgtatcgcggcaaccctgccgttggttatcgtgcgtacggaagcgtttattcaccagcaccaggccgttttacgaaacgggacgcgttttgtggcgacaggctacggcgcgctggttggggtggcaaaagagttggaaactaaatttaccgagacggtgcgtgttccctcaagcgggtttgagctggaagcctatatgcacggcccgtatctggaagccaatgcggaacacgtgatgttcttctttgaggaccggcccgacgcgcgctccagggcgctacgggagtatatgacgcctgcggtcgccaaaacctttactctcacgctggcgaaggcggcgcaggatgaccagacgcttgcgctggatgtagcggttgatcaccatttctcgccattactgttgattgtgccggtacaactcatggcgtttcatatcgcctcactgaaaggcatcgacctttcggtacgcatttttgacgatttcgatcgcgttttaaaaagtaaaatctgaacaatcaggagaaaaatatgttgggttttaatcaggacgagtacctgacgagtgctcgtgagatcatcgctgcgcgccagaaggcagaacaggttgctgacgagatttatcaggccgggttcagttctttatttttcgcctctgttggcggttcactggcgccaatgatggcaattaatgaatttgccaaagaattaacaacgttgccggtttatgttgagcaggcggcagaattaattcataaaggaaataagcggctgaataaagactctgtggttattacgctgtctaaatccggcgataccaaagaatcggtggcgatcgccgagtggtgtaaagcgcagggaatacgcgtagtcgctattaccaaaaatgcggactctccgctggcgcaggcggcgacatggcatattccgatgcgtcacaaaaatggcgtggaatatgaatatatgctgctgtactggctgtttttccgcgtgctgtcgcgcaataacgaattcgccagttacgatcgcttcgccagccaactggaaattctgccggcgaatctgctgaaagcgaaacaaaaatttgatccgcaggcggacgctatcgccagccgttatcataacagcgattatatgatgtgggtcggcggcgcggagatgtggggcgaggtctatctgttctccatgtgtatcctggaagagatgcagtggaagcgcacgcgccccgtcagctctgcggaatttttccacggcgctctggagctgctggaaaaagacgttccgctcattctggtgaaaggggaagggaaatgccgcgcgctggatgaacgcgttgagcgttttgccagtaaaattaccgataacctggtggtgattgatccgaaagcgtatgcgctggacggtattgatgatgagttccgctggatcatggcgccgtgtgttgtttcgacattgttagttgaccgactggcggcgcactttgagaaatataccggccacagtctggatattcgtcgttactaccgtcagttcgattattaacagaaaggggcgtgtagcatatacagtgcctgatggcgcttcgcttatcaggcctgtgcgccagtttatggataaagatgatgtgtaggccgggtaaggcgcagccgccacccggcatatatgacattctcttttaactttcaacattcaccactttgatctccaccatgccaatccccaatttgcgcggcgaatggcccaaaatattaccttcgttggtggagacgggagcgggcggcgcaatgactaaggtattcgcgtccgtcgggttgttgaaatgcagcgtgatagtggacacatcgtgacccagcaccagcgtctgttcttcgttgcctacgcgtaccggaatcggtcgattcgcgttgtcgccgaaggctttggcggtgatcaccagatcaaactttttcggcagcggcgctttatattcgattttaacctcatcgcccaactgcgcatttgaccagcgcccccaggactccggccgggaaatgccgctaaactgcttcacctcctccggggcgcccgccacgttaaagataaagctatcggctttataacgaatatcgttatcgacaatctttaaggtatcgacgttgcctttgtagcgctccatatcgatcatcgtgtctttaaacgccgtcttaccctgccactgcgctttatcaacatgctgtacggtttgctgcccgccaagctgcccctgcgagacgcaccagtcggtagagagcgccagcgccggcgcccatagctgcgccattttgtagcagcgatcgatccaaacgaaattatcgcgcggggcgaagtcggccaactggaaccgtagcggagcggagtattcactttccggtaacggctcgacgcgcttatccgatacgcgcagtagtaacggcaggcggaagtggctcccggaaaacgcgatcatgtttttgtcccgatcgacggtaaaatcttttatctctttcgggaaattccacaggcgaatgatatccggcttcatcgccagcactttctcttttacattcaggaacacttccgacagcgactgcccggaaaggctgctacgtcccagaccgataaaattatcgccgccgagaatatccagcaccgttgcgccgttgtccatcgtgttgcgtttgaccgccagagtctcctgctgtggtttatcgccgcgcagaatgaaaaacagattgttgcgatcttgcttattcaggtatttccaggccgtattgttcatcgccagatggtcggaagagacgacgataacggtatctttaaaccacggcgacgctttgattttgttgataaactcggcgatgttttcctggctgcaacttacggcgctaaaggactggttgggcttgccgtcgtaatcgtagcgtttgcggttgcaggtgcgtgagataaacccgtccgggtggtgagtatctacggtcagcgtaaacagcgaaaaacgctggcctgagcgggaaagcgcttcaaatttcttccatgcctcatcaagcaccgtatcgtcgtagaagccccagtcgttacgataagacgggtccgccaccaccgtttttagctcttcagcgccgtacagatgatcaaatccgtgtgatttcaggaacacgtctttcccggcaaaacgcaggttagcgccctgcacgaaatagttctggtagccggagtttttcagaatatcgccgaggcagatattctgcgggaagaagctagaaaccgacgcggacgcattgccctcaaacggcgcaaacagcggaataccgcactgggaagccaccatcccggcgatggtgtaatccgttcccggcagttgcatggtatggctgaaatccagcccctcatttttcagcgcgcccaactctggcgtgagattggggaacgcgtcattatcaaaataggtccgttccaggctctcgccgtagatatagaccagattgagcttcggattaggaatggtttttgctggttctttataataaacggcaaaatccggatcgccatcgcgcatttgtgattttaccagttcggtaatctggcgaaacgccgggctggcgtcgaccgaacctaacgccagcagtaacgccagcaggctgtaaccgacatgatgaggatggtgacggcggcggcgtagtacccatcccagcgcgccgaataccgccactaacgccagggcaatgccgattcccggcagaatatatttgccgactcccgctcccgtcagactattcgtgagcgtataaagcactgcgtcgttgatcccgtcgccggtaaaatagtcgctggcatacagggtaatattcagaatgacaaaaagtcccagcaccgtgagagtggcggcaaaccaccaggtgttacggcccgccttccaggcatatatcagcacagaggcgagaaacagagcgacagagagcaactcggacaactgacgatcctcaataaaccaggcttatcgctggcaggaaaaaatttctaacaatgtaatagcgatgtcacattgctgcaattctaataactttacacggcgctgttatttagaatgagtttagaaagttggttttttgatcggcatcacttcctgccatagcggttaataacaggaaaagacgaagagaaaaatcgggttaatgccgtgttggcgggtaaagggccaaaacacggcgtttatcagggcgtcccggcgtggcgcacggtcagaaaaacgcagtcaggagaggaaattcagcccttgctgcaacaccagatcgcaagctttggttttcaccttttccgccagcggcgtactgccgatattattgaggttcaactgctggccgtccttcgtcttgagcaacccttgcaggccgttcaggtagttagtgtcctgctcctgctgtgtggtatccaaccccaacttgttcagaatctgatttttaacgttttccacgttggtagcggacgccagtttctgtttggcgcagtactgcaaaataccggcggcattattcatattatcggcgctgagcgactgggcacctctgctgagcagaccggttagcgcagaaagcgacatcccgccctgctgtgcgttcgcgccctgagcgcttaactgactggcggcaataccgctggtggaaatcagtacgctggcgatcgccgcgcagcacagaacatgtttcgctgtattcatggtaatcacctgtgttatgccagtcaggcgtcgtatcgccctggcgcacgttgcaatttaatactctttacccgtcacccggctgcggtaactgtcccaggtaaaattaacccataaactgttgccgagacgcatacggtccatgacgcgttcgccaagcattttcgtcatctcttccatattgctgttcgtcaacatgccggtgggacgttttgacgaggaacgacgatcgacaatttgattgatgatcactttttcatagcgggattcggtctgcacgccgatctcgtcgatcaccagcagatcaacgttactcagatcgttaagcaactgctcttcgctggtttcccgattgctgaacgtgtctttcatcgctgacataatatccgctacggtgataatcagtaccgactttccgcgcagcagcagctcgttacaaatagccgcggcgagatggtttttaccggttcccggcttgccggaaaagacaaagctggcgatattgccgtcaaactcatcaacgtactgtcgggctttgcttaacgcgttcatttgtccgtcgcactcaacccgatagttatcaaacgaacagttctgatgcagcggtcgaatgccggaacggttaaaggtgcgctgcattttcatcgcccggttttcccgcgccagcgctgccgcccggatctcgccttgctctttctgccacgccagcaattcttcgcccgttttaaacgccggcgtaatatgcgcaggcatcattttttgtagacgctgcatcaggtcgccaacatttttcatcgttaccccctaaaacctggtggaatatgattgtcaggttcgctgacgctattgatgtcgcgctgcggcattccgccattgctggaacggctgatttgcacgctgcgcgccagcttttgctgccactggatatggtgaaaaaccttaccttccgcctgccagtaggcgataaacgccgccagctcttctgcggtgaccggctcccgaagcgccacgccccaaagggcagcctgacgctgaaaatccgcatccggttgccaggcgggatacatggcgaattttccgcagggaatcgcaacgggggcggcttcgggttcttcgtaaaattgtgcgtctaacgccacatcgcttcccggacgtgataacttttcttcaagcgccagcagttcagccatgcgtgcaggcgtcacggcataaaaggcaggcgcattattagcgaataccgccactgcgccgcccgttgacttcgccagcacagcatgatgatcgtgtaaaaggacgtcaataccgatgacgtccgacgttaaaattctggaagacataatgtttctcaatatggaacaacaaccgagaagggcgactgtttttatagtaccacacagacctgtaagaacagcaggaggcgttccaccaatcacacgcgggggcgtttgcggtacagccataatcccggtacagagaggccaattgagagcgcgccaacaatggaagaggctttcagaaaattggtcagcagcgtaatcatcatcggttcgctatagcccagatggctaatttttactgcggaaatcatcgcggtataggcggaaatccccggaaacatcgggatcacggccgcgacggtaaacactttagggtgagcgagataccagcgtgaccactgaataccaatactgccgaccagcagcgaagccataaacgttgaccattcgatattaaaaccagcgctcatcatcagcatacgcgagccatgacccagcgcccccagtagcgcgcaccacggaagcgcccggtggggaacgttaaagaccatcgcaaacccgacggcggggatcgcagacaagatcatgtcctgcattagcgccagtaaaaagtcgattatacccatcctcgtagcccccatactgtcattgacatcactacgcccacacaggtggccagtgtcaacaggctggcgatagcccagcgcgccagcccggtattaatatgtcctttaaacatatctgcgacggaattaatcagcggaaagcccggcaccagtagcagtacgctcgccgccatggcgatagtgggcgtctggctaaaggcgggaagggtgagcatcagcccggaaatcgtggtagcgacaaaggcggtaatgcaaaaattgatctgcggatgtaaatgccgctgcgccagcatctggcggatatacatggctatcatactggcgaaaaaggtgataaccgcgccatcccagccgccattattcagcttacaaaagcaggagcaggaaagaccgaccataaacgccaccagccagcgcggataacgcagcgggcggagctggctaaagcgtttttccacgcctttgtaatccagcagacgatgttccgcgaggataacgatatgctgaacctccgtgacgacgtgcatattaatgccgcgatcctggtttttacgtgtcgatgtcagacattgtccgtctttaatggtcgtcaggacaatggcgttagaggagatcgcgctttcgacgctatccataccgagcgccaaaccgagtcgggtggaaagctcatcaaccagtgcgctttccgccccgtgctgcaataaaaacagcccgcattgaatacataaccgtgttactgctcgttgaattgattgctcttcttgcatgactcgtcctgtccgaaaagacattctatgcgccgccactatgacagaggcttcctttttaacacgaagcacaggcatgatggcgttggttaagatcaatttcttgttgataaaaacgtcaaccgccagacgcaacgcataagcttcctgagacgtgcgcttcgtcacaggcaggatatccttatgggcgacggttctcgtatgtccgtttccagaatagaggcattatgccagcctggccgctcatttttgaatcaatgatgtggtgaattttatcaacgatatgcattaatggtttaacaacaatggcgtgagtagcgggcgtaaaattaggcatgacttagtataattcgcagatattacatgagttttatggatggtagacagtattgttgggcttttgttttaggactcagcaatatgaatgaagggcgaactcatattttaaatttattaatatgatgcgttttcgttagaattactaatgtgcaaatttagttaatttaattgtcttgcttctggttttatgagtaactatgcgatagtgatttcatgtttttgtgctatgtggattgtagcgcaatcaatgttatatttttaaaaataaaacaaggataattaatccactcggcttatatttctttgcgctcattgttaatagtgtttttattaatggggcaatgaaaagtggcggcgtgggtgcggaggaattatgctgccaggatgctgcaaaaatggacttattatcagtaaaacccctcttatacaggaaggccttaaaggggctataacaggtaatttccccgattataaactggcgtattgtcgtacgatagaagagctaacgctgctacagctacgccgaagtaatttagttattgctgatttagcagttaacaatgcctctccccgcgctatctgcgaatatttttatagcttactctcgcaatatcgcgacatacattgggtatttctggttcctaaatcctgctatccacatgcggttgatctcctgatgggccccgtcagcaccttgctttcagacgaagagccaatcgagaatcttattagcgttatccatgcgggaaacgctcgctcagaaagaataagcaaaacattattatcgcctcaggtaccgtctgaaattcagcagtcccacgacaggccgattgtccttacgctgtctgaacgaaaagtattacgccttttaggaaaagggtggggcattaaccaaattgcggcgttacttaaaaaaagtaataaaacaattagcgcccaaaaaaatagcgccatgcgacgcttatcaatacacagtaatgcagagatgtatgcatggataaacagttctcagggagccagagaattgaacctaccttcggtatatggagaaaccatggaatggaaaacagaatcagcaagagaaatgttgcgctcgtagaaaaatgcgtgatgagcaccattggtattaaagggctatttgatgcaatgccggattgccgacatacgcttcatattttttcaaaaccatccgcgttttataaggctgcgctaacgacgccgttttctgccgttattttttctctttctgcgttaagaactgaacgccggacaggattatccagcctgacggaactggcgataaattatccccatatgcggcgtctggtgattgccgatgatgatgctgaagctcgcttaatcagcgcgctatccccgctgccgctggatggggtcatcagcaaagcgtcgccgttggatgttttacaggatgccttatttacatcgcttaatagcgcccgacggacaacggagcgtacagacaatctttgggagcttcaccagaattgtatgcttagtccaaccgagcgggagattctgcgttttatgtcgaacggctactcaatgccgcaaattgctgtccagttagaacgtaacattaagactatccgagcgcataagtttaatgtgatgtccaagctgggcgtgagttctgatgccgggttactcgatgcggcggatattctgttatatctgcgcgccggcgatgctaccgcgctccagcatcgggtatagcccgcgccggatgcgccgtgcttgttcggggaatcagggtgccaggcacgttattggcacacgtctacccaggtcgccgatgtcagttcagccattctttccggcgtgatgcgtaccgcgctgtgcgtggcgcctgcggcaggcaatacttcgttataccccttcagagagatgtcgcaataaacgggcagcgggtgctccagcccgaaaggacatacgccgccgacaggatgtccggttgcattgaccacttcatcgctgctcaacatacgggcttttgcgccgaaagtggttttaagcttcttattatccaggcgggcatcgcctttcgcgaccaccaggataatggtgtcttttactttaagcgagagcgtcttagctatctgccctggctctacgttgtgcgctttggctgccagttcgacagtcgctgtactttgatttaattcgataatttcaatatcgggagcatgatcggccagaaattgccgtacagattgcagactcattcttctctcctgagaccttaccaatagccacggtagacccaaaaatggcaaaacgtaatttggcatacggagagcgccgctgtaaatataataatgtgacaggccagcagcagtaagccgtgacgataactgaaggcaacgtaaagcggtttactttagcgtgcagtcgccgcactgctgtacgtcaggtaagcggtaacgttggcagcaggttctgcgtaccagaagaccgtcgcgcattacgacggtccgccacagcgggttatcctgaccgtcggatagctgcttttcaaaaaaacagcgctggcgtagcgttgccagcagggcttcgccaagcagcggtttcatctcagtcagataccagttgattaaataaccggtattgctccagataagtttcgcgttgatgtcgccagtcgcctccagcgcctgaatgaccggctgtagtgcggagactattagcgtttccattcgttcttccggggaacgctccgttgccaggttatcctgatgcacatcaagccagaaacacgcggcgcgcccggtttcatgaaattcaacgtgaatatgttctgccgagacattgatagcgcgcgcttgcgtcagtaatgccagcatcagcggcggcgtcatcagcccgatataccattgcgcccatagggagagtaacggcttattttcacgtggcaggcctggcgtgtgccgatagatgtgatcggaataggcggccagcaatgaacgaaacgtcgcggggcgcgtccactgggcaagagtcatcgccgctggcggcggcgtttcatccagccggatgaagtccaacaggtgcttacgggtagaggcgatcgtctcgcgtactgcgtccgccagcgaggcgtcttccggctggggagcagctcgccagataatatcgtcagcaatcggtgcggaacggtaggccatagcgcagtttaatgatgttaatctaaatgataatgattgctaatcctatcgatagcgataaacgatggcaagcggtttatggttaacgctgttggcgtagcacgattacgccaacaggattcatagggcgcgcatgtcgtcgctgaccagaatgtggttacgtccaagatgcttggcttcgtagagcgctttatccgctttttcgatagcgtctccgatattgcgatccgtcaggggcgcaatgccgatactgacagtgacattggtggcgacgctttcgttaaacatatgcgggattttaagatcgtatacttcctgtcggatacgttctgcggtagcgcgggcttgctgtggttcggcggtggtcagcaacaccagaaattcttccccgccaaaacggcagacgacatcgcgcgatcgcacggcgtcccgaattgccgctgagacgcgaattaacgcctgatcgcccatcatatgaccgtagtgatcgttatacgctttgaaatgatcgatatccaatagcaggacgtagtgttcatggctgcccggcgcctgtaacgtatccagccgattttgcaggccacggcggttatataagccggttaatggatcaagcatactcaggccattgagggtttcccgctcggccagcagcttaaacatgagctgttgggcaaaattatcgtagcgtttctggataacatgttgaatagcgattcccaccattggcagggtcagcaaatagagaattcgcaaaccttgttcattaccgttcagccacaggcagaccgcgactggcggtagcgaatagagcgtaaacgcgacgatattcgcggcaaaggctatcgagccgataaacagaacgctaagcagggaaatcagtaaaaaagagaaatcataatggcctaacgccggatactttagcgcaatatgcgccgcccatattcccccaaagagtagggagataaaggggagattaattcttttttgtccatatttcccatgccatatcaacagtaatacgctcaggaccactatcccgatcattggcgtgcaaaatacattgatctgataaagggggaaaacgagagtaaatagcgccgacacggcgttgagaaacaagaaaagacgtaaagaaaactgatacttcttaatacgaagcgaccgccaggatggggttgtcatgggtaattgtcgttatttatcggtgatatacacggaatcgggcgccaacatgaaaataacgtatgagaaaaggtcgcctaaagcgaggtgttgttgtttttacgttaacagtcggacaatttatcaccttactgaatacgtgtcatcaaccgttaagtaaaactcatctctttagctttctccctggctgacaaatgagaaaatatatcatatgatattggttatcattatcaattccagaggtgaaaccatgttgcagcggacgttaggcagcggatggggcgtattattgcctggagtgattatcgttggactggcgtttatcggcctgtcagctgatgcgctgaagctgttgattgtatcaggattgctactgtctgcgctgatgttgtatcacaaacaattacggcattttgtactgctgccatcgtgtatagcgcttattggcggcatgatgttggcaatgatgaactggaatcagggatgaaaatgaagagacaaaggaaggataagataattggtgcgaggggggggacttgaacccccacgtccgtaaggacactaacacctgaagctagcgcgtctaccaattccgccaccttcgcacagttatcttactttttgatatcgcctcgttggtgcgaggggggggacttgaacccccacgtccgtaagaacactaacacctgaagctagcgcgtctaccaattccgccaccttcgcccagtgcgagcaatatcaacgtggttttggtgcgaggggggggacttgaacccccacgtccgtaaggacactaacacctgaagctagcgcgtctaccaattccgccaccttcgcataccatcgattcttgaaaagaatcactaccacggaggcgcattctagtggttttcagctattcgtcaatagttaattgcatgggatagattgattgctgcaaaaatggacgcgagacgtaggttggataagacgctttgcgtcgccatccggcacatgcaaccagatggcgctgcgcttatcaggccaactatttcttcgcctgacgggtcatcacggtacgataaaccttaaagcgcccggtttgcgcgatgacttcatggaagccaaaagtctcatccagaatcttaggatagggcagaaaggcgttcgccacgatgcgtaactctccgccgctgttcagatggcgcactgcgccgcgaatgagcgtttgcgccgcatcgaggctggtttgcattccgtcgtggaacggcgggttggagatgatcatgtcaaaacgtcctttgacttccgaaaagacgttgctggcgaatacctcgccttcaagaccattagcggcaagcgtggcgcggctggcttccaccgccggagcgctgacatcacacagcgtcaggcgcactttcggcgaatggctggccagcgcggcggaaagcacgccagcgccgcagccgacatccagcactttacctttggtgtgcggcgtcagcgtagacagcagcagttggctaccaacatccagtccgtcgcggctgaatacgcccggcaacgttttgatggtcagcccgtcgatgttgtactcggcccaccaggattcaagactaaactgcggctgcttttccagacggccatggtaaaggccgcaacgtcgcgcgctatctactttgttcagcggcgcatagtccgccagcatcggttcggcgctacgcacgccgctgcggttttctcccacgacgaaaacatcgacgcccgacggcatcagcgacaaaatattcatcaactggaactgcgcttcgggtttatttttcggccagtagtagatcagcgtatcgcagtcagcgacatcgctggcttgcgcgaccaggctaaaacggacgttatcgcccatctggcggcttaatacctgccagtggtgaaactgttgcgtatgcgcgcggctggcggcgcattcaaagcgcgcgggcaggtcatcctgcaaatctccggcaaaaagaatacggctttgttcgaaatcatcactgtggcgcagcaagacttcacttgccggggtaaaagcagacatggaatgctccttaattcagactggcggcgattatagtagtttgatggcgcagattcgacagatttgctatatttgcgcccctgattacaggagcgtttcgctatgacatcccgacgagactggcagttacagcaactgggtattacgcagtgggcgctgcgacgtcctggcgcgctacagggcgagattgcgatttcccttcccgcgcacgttcgtctgatcgtggttgcagaggaattacctgcgctgaacgagccgctaatgcgcgatatcttacgcgcgttgaccgtgagtcccgatcaggttttaccgctgacgcctgagcgcgtcgccatgctgccgcagggcagccgttgtaatagctggcggttaggaactgacgcgccgctccaactcgaaggcgctcaggtcacgacgccggcgtttaatgaactccgggcaaacccggcggcacgcgccgcactatggcaacaaatctgcgaacatgaacacgatttctatcctcagcacgaccgatctccccgcagcctggcagattgagcaacgcgctcatgcgtttccgtggagcgaaaaaacgtttttcggcaaccagggcgaacggtatctcaaccttaagctgaccgctgatgacagaatggccgcgtttgccattacacaggtggtgctggacgaagcgacgctgttcaatatcgccgtcgatccggattttcagcgtcgggggctggggcgtatgctgcttgagcatctgattgatgaactggaaacgcgcggtgttgtaacgctatggctggaggtacgcgcctctaacgctgccgccatcgcgctgtatgaaagtctggggtttaacgaggcgacgattcgccgcaattactatcccacggcacaagggcatgaggacgccatcatcatggcgttaccgataagcatgtaataaaagaggcaaggtgtaatgatgaagtgggactggattttctttgatgccgatgaaacgctgtttacgtttgattctttcaccggcttacagcggatgttccttgactatagcgtcacctttaccgctgaggatttccaggattaccaggccgtgaataagccgctatgggtggattatcagaacggcgcgattacctcattacaattgcagcacgcgcgctttcaaagttgggctgaacggctaaacgttgcgccggggctgctgaatgacgcttttattagtgcgatggcggagatctgttctcctttgccgggcgccgtttcgctacttaatgcgattcgcgggcaggctaaaatcggtattattactaatggttttaccgcgctacaacaaactcgtctggagcgcaccgggctgcgcgagtatttcgatctgctggtgatttccgagcaggttggcgtcgcgaagcccgatccgaaaatctttaactacgccctggagcaggcagggaatcctgaccgctcgcgcgtattaatggttggcgataccgcggaatccgatattcttggcggcattaacgccggactgtcgacctgctggcttaacgcgcatcatcgcgagcagcccgcgggtatccatccaacctggactgtggcgtcattaagcgaactggagcagctcctgtgtaaacactgattgcctcccccaggttgatgggtaaaatagccgcatttttcgtattcaacatgcgtggtcaaacgccgcgcttactcaagaagatttgactatgacgttgtctccttatttgcaagaggtggccaaacgccgcacttttgccattatttctcacccggacgccggtaaaaccaccattaccgaaaaagtgttgctgttcggacaggcgattcagaccgccggtacggtaaaaggccgtggctccagccaacatgcaaaatctgactggatggagatggaaaaacagcgtggtatctctatcactacctcggtgatgcagttcccgtatcacgactgtctggtgaatctgctggacaccccggggcacgaagacttctccgaagatacctaccgtaccctgacggcggtggactgttgcctgatggtgatcgacgccgcaaaaggcgttgaagacaggacccgtaagctgatggaagttacccgtctgcgtgatacgccgatcctgacctttatgaacaaactcgaccgtgacatccgcgacccgatggagctgctggatgaagtcgagaacgagctgaaaatcggctgcgcgccgatcacctggccgattggctgcggcaagctgtttaagggcgtttatcacctttataaagatgaaacttatctgtatcagaccggtaagggccacaccattcaggaagtgcgcatcgttaaagggctgaataacccggatctggacgccgccgtcggtgaagacctggcgcaacagctgcgcgacgagctggaactggtgcagggcgcgtctaacgagtttgatgaagagctattcctggcaggggaaattaccccggtatttttcggtaccgcgctgggtaactttggcgttgaccatatgctggatggtttagtggcgtgggcgcccgcgccgatgccgcgtcaaaccgatacccgcacagtggaagcctcggaagagaaattcaccggttttgtctttaaaattcaggccaatatggacccgaaacaccgcgaccgcgtggcgtttatgcgcgtggtttccggtaagtatgagaagggcatgaagctacgccaggtccgtaccggcaaagatgtggtgatttccgacgcgttaacttttatggcgggcgaccgttcgcacgttgaagaagcgtacccgggcgatattttgggtctgcataaccacggcaccattcagatcggcgataccttcactcagggcgagatgatgaagtttaccggtatcccgaactttgcgccggaactgttccgtcgtattcgcctgaaagatccgctcaagcagaagcagctactgaaagggctggtgcagctttctgaagagggggcggtgcaggtattccgtcccatctccaacaacgatctgattgttggcgccgtgggcgttttgcagtttgacgttgttgtcgcgcgcctgaaaagcgaatacaacgttgaggcgatttatgaatccgtcaacgtggcgacggcgcgctgggtggaaagcgccgatgcgaagaaattcgaagagtttaagcgtaagaatgaaacgcagctggcgctggatggcggcgacaaccttacctatatcgcccccacgatggttaacctgaacctgacccaggaacgttaccctgacgttcagttccgtaaaacgcgcgaacactgatccctttccgggcgcggcatccgccgcgccttcgtactttccctgcctttttaaccgcttacggaatgttcttaaatcccgcgttttttctccgatctgcctgttttttatacgcaccgacaagcgattttaaaattgtgatctatatttaacaaagtgatgacataaatgtcggctttaatgcctgttcaatgcgtgaatatgagagcttaaagctgagatttgtttcagtcacgatattaataactgaaacggaagggtggcaggcgacgcgtcgttacaaattcacgaatgtgatgccagtcattgacttcagaaaccggtgagtttcaccgcattcagcaatgcaacctcgtgttgcctgagctcaaattacgagcaaactatacaggacaaaatcgatgactatgacaagactgaagatttctaaaactctgctggccgtaatgttgacctctgctgttgcgacaggttctgcctttgcagaaaacgcaacaacggacaaggcgcaaagcggaaccgaaaccgcagggcaaaaagtcgatagctctatgaataaagtcggtaacttcatggatgacagcgccatcactgcgaaagtaaaagctgcgctggtagaccatgacaatattaaaagcaccgatatttctgtcgaaaccaatcagaaagttgtcaccctgagcggctttgtagaaagccaggcgcaggctgaagccgccgtgaaagtggcgaaaggcgtagaaggcgtgacctccgttagcgacaaacttcacgttcgcgacaataaagaaggttccgtgaaaggttatgccggcgatacggccacgaccagtgaagtcaaagccaagttgctggcggacgatctcgtcccttcccgtaaagtgaaagtggaaacgaccgatggcgtcgtacagctctccggtaccgttgaaactcaggaacaaagcgaccgcgctgaaagcatcgcgaaagccgttgatggcgtaaaaagtgttaaaaacgatctgaaagttcagtaattcgtcgtaattcgtcctcccgacgtttgtcgggaggcgtaatgtgcaccacactaaaaatatcgcgaatgagtagcctgagcgctcatatttagcggtcgacattaactatggtaaaggagaggcttatgtttcgttggggcattatatttctggttatcgcgttaattgccgccgcattgggttttggtggactggctggtacggctgccggcgcggcgaaaatcgtcttcgtcgtcgggatcgtgctcttcctggtcagcctgttcatgggccgtaaacgaccctagcaggcatctgtaaagatatattgctatcaagccagtccagcggactggcttttacggttttagccgttaacgttttgcgttaccttgtcagcctggaaaaaaatgaaaaacaggaaggcagaggtgggccagcgaataccggttacgctcggcaatattgcgccgttatcattaacaccgttccggccaggccgtatggcgctggtctgtgagggcggggggcagcggggcatctttaccgcaggcgtgctggatgagtttatgcatgcgcagtttaatcctttccatctctacttcggcacatcagccggtgcgcaaaatctctcggcgtatctctgcaaccagcccggctacgggcgcaaagtcattatgcgctataccaccaggcgcgaattttttgatccgctgcgatttgtacgcggaggaaaccttattgacctcgactggctggtggaatccaccgccgcccggatgccgctgcagatggataccgcagcgcgcctgttcgacagcggaaaatccttttatatgtgcgcctgccggggggatgattacacgccgggctatttctcgccgacaaaacaaaactggcttgatatcattcgcgcctccagcgccataccgggtttctaccgtaccggcgttacgttagagggcatcaactatctggacggtggcattagcgacgccattccggttcaggaggcggcaaagcggggggcgaaaaccattgtggtgatccgcaccgtaccctcgcaaatgtattacacgccgcagtggtttaagcgtatggagcgctggctgggagagagcagtctacagccgttggtcaacctggtgcagcatcatgaaacgtcctacagcgcgatccaacaatttattgaaaagccgccgggtaagctgcggatcattgaaatttatccgccgaaaccgctgcacagcatggcgctgggcagccgtatcccggcgctgcgtgaggattacaaaaccgggcgattatgcgggcgttatttccttgccaccgttggtaaattgctcgccgcaacgccgcctctcttgcgccatacgtcgcggattgccgtgccggaaacggtggtcgtgcctccggcgccggtggccaatgatacgcatgtggcggaggtcattagcgcgccgcaggcaaacgacaccacatttaccgacgaggatctggcgtgagctggcgctttatcgatacacactgccattttgatttcccgccctttacgggcgatgagcgcgccagtattcagcgtgcctgtgaggcgggcgttgaaaaaatcatcgtgccggcgaccgaggcggcgcactttccccgcgtgctggcgctggcggcgcgtttcccgtcgctttatgctgcgctgggattgcaccccattgtgattgagcgtcatgccgatgacgattctgataagctgcaacaagcgctggcgcagcaacagaacgtcgtggcggtaggcgagatcgggctcgatctttatcgcgacgacccgcagttcgccaggcaagagcgatttttagacgcgcaactgcaactggcaaaacgctacgatctgccggtgatcctgcactcgcggcgcacgcatgacaaactggcgatgcacttaaagcgccaggatctgccgcgaaccggtgtggtgcatggttttgccggcagtctgcagcaggccgaacgctttgtgcgactgggctataaaatcggcgtcggcggcaccatcacctacccgcgcgccagtaaaacccgtgatgttatggcgcgcttgccgctggacgcgctgttgctggagaccgatgcgccggatatgccgctaaaggggtttcaggggcagccgaaccgcccggagcaggcggcgcgcgtatttgatgcgctctgcgaattacgtccggagcccgcagaggtgatagccgatacgctgtatcgcaataccattaccttgtttcggctctgatggcatcgcagccgccgtccggcaggcgacgcttacaaatatagcgccggcaaaatcagcttcgccaccccacgcgcgcgcaatccgtcagccagccgttccacctcttgcggcgtcgcgcctggccaggctttcgcttcgccatagacaccgtgcgcatgaaaggcattcaaacgcaccggaacctcgcccagcgaagtaataaacgccgccagtgaatcgatatgcgccgcatagtccacctgacccgggataaccagcaaccgcagctccgccagttttccccgcgcagcaagaaagcggatactgtgcttaatatgcgtgttatcacgtccggtcagacggtgatgacactcgctcttccaggctttcagatcgagcattacgccgtcgcaaaccggcagtagtttttgccagccggtctcgcttaactgaccattactgtccaccagacaggtcagccgttgtaactgcggatcggctttgatcgccgtaaatagcgccacaataaacggtaattgcgtggtcgcctctccgccgctgacggtaataccttcaataaacagcgatgctttacgaatatgacgcagcacatcgtcaacgctcatggtctgcgccattggcgttgcctgctgtgggcacattttcaggcaggtatcgcactgctcgcagacgtccgaccgccataccactttcccgccatcaatgctgagggcgtggtgcggacactgcgatacgcattccccgcagtcgttacagcgtcccatcgtccacgggttatggcaattcttgcagcgcaaattgcagccctgtaagaataatgccaggcggctgcctggcccatcgacgcaggaaaacgcaatgatcttactgactaaagcgcatctgttgttcatggctgactacgcgtggctgtcgttccaggatgcgggtattacgtgcggcttcttctcccagccaggtggtattcgtgcgcgagccttcggcgcgaaatttcgccagatccgacaggcgcaccatataaccggtgacgcgcaccagatcgttgccgctgacattggcagtaaattcccgcatcccggctttgaacgcgccaagacaaagctgaaccagcgcctgcggattacgcttgatggtttcgtccagcgtcagaatgtcgctgatcccggcatggtaaaaggcatggtgcggcgcgacggtttgcaaatgggtgatagggtccggttcatcgccatacggcagacgcgcgcccggcgtagtgccaatatcggaactgatgccagactgggcatggagcagcgcccgttgcttccagccatacttcactggcgtattttcgacgaaatccgccagttgggcgctgatacggtagcccagctcgttcgccgtatcattcttgccgtaacgggcggtcaggcccgcgttttcgcacagcagattcacggcttccgccagcccgtacataccgaacatcggcgcaaaacgttcgggctcgatcaaaccttcctgtacaagaaagctattctcaaagaaatgtgatttttcatagaggaattcacatcgtgaattaatgatggcgatctgctgtcggcagtagtgcggtagcgtacgtgaaaagaagtcatcgacagacgtactgcgttctgccacggctttcaggttgagacgtaccagcgtactgccgccgccgccaagcggtagcgagttataacaactgacgatgccataatggccttttgtgaaaattttatcatttacagggccattggaaatgtgtggcttactgcattcacaaatgtttttggcgacctccagcagcagatcgtccggcgtaatttccgcatcgtagataaacgtcaggttaggcgccacctgctttagctcggcatcggcgcgcaaaatcgctcgtgtgacaggcgtatcggcagggccaatattggcatgcataaaggcgtctggcagcgttctgtcgagataacgccagaaacgttttattcgaatatcgatcgcatcttgtgttagaattctaacatacggttgcagcaacgcatcaagctggccgagataaaccggcatggacgtcacggaaggaacgtgatgatacagaatggtgagtagggataacgcatcatccagatctttcgcgccttccagttccagccactgtgaaccgttagccagaaatcgggcgtaatcgggcaacacgtagcgcggtttgaagggggcgtgcccctcaaacatatcgcaaatgacgccttcatccagcgcctggcgggcatcttccggcagggtgggataaggcagggcgttttcagcttccagcgccagaaaatggcgtttttgttcaggcgtgagcaccgggctggtcacaatttgctggcaacgctgctggagcgcagtttcgcatgaggcaggcatcttcgtttcctctttatgccgggacgatgcgctattgtagaaaatggcggcaaaccgactttgatcctgatgcgcttatcgctcgaagaacagacggtgacggcgggataatttgattcagatctcattacagtaatgcaaatttgtacgtagttttcattaactgtgatgtatatcgaagtgtaatcgcgagtgaatgttagaatattaacagactcgcaaggtgaaattttatacggcaatgccgttggagaatgtcatgactgatttaaaagcaagcagcctgcgtgcgctcaaactgatggatctgaccactctgaacgatgacgacaccaatgaaaaagtgatcgcgttgtgtcatcaggcaaaaactccggtcgggaatacggcggcgatttgtatttacccgcgttttatcccgattgcgcgtaaaactctgaaagaacaaggtacgccggacatccgcattgcaacggtgactaacttcccgcatggcaatgatgacatcgatattgcgctggcggaaacccgtgcggcgatcgcctacggcgctgacgaagtggacgtggtattcccgtaccgcgcgttgatcgccggtaacgagcaggtgggttttgacctggtaaaagcctgtaaagacgcttgtgccgcagcgaacgtattgctgaaagtgattatcgaaaccggcgagctgaaagaagaggcgctgattcgtaaagcctctgaaatctccattaaagccggtgcggatttcatcaaaacctctaccggtaaagtgccggtaaacgctacgccggaaagcgcgcgcatcatgatggaagtgatccgcgacatgggcgtttccaaaaccgttggcttcaaaccggcgggcggcgtacgtacggcggaagacgcgcagaaattcctcgcgattgcagacgaactgtttggcgctgactgggcagattctcgtcactaccgctttggcgcatccagcctgctggcaagcctgctgaaagcgctgggtcacggcgacggtaagagcgccagcagctactaagctctgatttgccggatggcgctgcgcttatccggcctacaaatccaggcctgtaggccggataaggcgttagccgccatccggcgatgtaagccttctactcttttccctcaggagggtaccgtgtttctcgcacaagaaattattcgtaaaaagcgtgatggtcatgcgttgagtgacgaagaaattcgtttctttattaatggtattcgtgacaatactatctctgaagggcagattgccgccctggcgatgaccatcttcttccacgatatgaccatgccggagcgtgtttcgctgaccatggcgatgcgggattccggtactgtccttgactggaaaagcctgaatctcaatggcccgattgtcgataagcattcgaccggcggcgtaggggacgtgacgtctctgatgttggggccaatggtagcggcctgcggcggttatgtgccgatgatctccggtcgcggcctcggacataccggcggtacgctcgacaaactggaagcgatcccgggcttcgatatcttcccggacgacaaccgtttccgcgaaattattcaagacgtgggtgtggcgattattgggcaaaccagctcgcttgcaccggcggacaaacgtttttacgccacccgcgatattaccgcgacggtggactctattccgctgatcaccggctccatcctcgccaagaaactggccgaagggcttgatgcgctggtaatggacgtaaaagtcggcagcggcgcgtttatgccaacctatgaactttctgaagcccttgctgaagcgattgtcggcgtggcaaatggcgcgggagttcgcactacggcgttgttaaccgatatgaaccaggtgctggcttcaagcgccggtaacgcggtggaagtgcgtgaagccgtgcagttcctgaccggtgaataccgcaatccgcgcttgtttgacgtcactatggcgctatgcgtggagatgctgatctccggccagctggcgaaagacgacgccgaagcgcgtgccaaactgcaggcggtgctggataacggtaaagcggcagaagtctttggtcgtatggtggccgcgcagaaagggccaagcgatttcgttgagaactacgataaatacttgccgaccgccatgttgagcaaagcggtatatgctgataccgaagggtttatcagcgcaatggatacgcgtgcgctggggatggcggtcgtctcgatgggcggcggccgtcgtcaggcgtctgacaccattgattacagcgttggctttaccgacatggcccgtctgggcgacagcatcgacgggcagcgcccgctggcggtgattcatgccaaagacgaagccagttggcaggaagcggcgaaggccgtcaaagcggcaattatccttgacgataaagcgccagcaagcacaccttcggtctatcgtcgaattactgaatagttgtatactgatctgatcaattatttttgaagcactaagtacggagaagatatgaaacgtgcatttattatggtgctggactcattcggcatcggcgctactgaagacgcggatcgttttggcgacgtaggttccgacactctgggccacatcgcagaagcttgcgccaaaggcgaagctgacaatggccgtaaaggcccgttgaatctgcctaacctgactcgtctggggctggtgaaagcgcatgaaggctctaccggtaaaattgccgccggcatggacggcaacgcggacgttattggcgcatacgcatgggcgcacgaactgtcctccggcaaagatacgccgtccggccactgggaaatcgccggcgtgccggtgctgttcgactggggctatttcagcgatcacgaaaacagcttcccgcaggaactgctggataagctggtgaaacgcgctaacctgccgggctacctcggtaactgccactcttccggtacggtcattctggaccagctcggcgaagagcacatgaaaaccggcaagccgattttctacacctccgctgactccgtgttccagattgcctgccacgaagagacctttggcctggataaactctacgagctgtgcgaaatcgcccgtgaagagctgaccgaaggcggctacaacattggccgcgtgatcgcgcgtccgtttatcggcgacaaggccggtaacttccagcgtaccggtaaccgtcacgacctggccgtagaaccgccagcgccgactgtgctgcagaaactggtcgatgaaaaacagggccacgtggtgtccgtcggtaagattgccgacatctacgccaactgcggcatcactaagaaagtgaaagcgaccggtctggacgcgctgttcgacgcgaccctcaaagagatgaaagaagcgggcgataaaaccatcgtcttcactaacttcgtcgacttcgactcttcctggggccaccgtcgcgacatcgcgggctacgccgcaggcctggagctgtttgaccgccgtctgccggagctgatggagctggtgggggaagatgacattctgatcctgaccgctgaccacggctgtgacccgagctggaccggtactgaccatacccgtgagcacattccggtgctgatctacggtccgaaagtcaaaccgggctctttaggtcaccgtgaaaccttcgcggatatcggccagacgctggcgacctactttggtacatcgccgatggactacggtaaaaacatgctgtgatacctgttgtctttcgcgctgtagatgcgttgacttcattcgctcaccccggtcacatagttaatctatgctcccggggattcacgaattcgtcgccttcctacaacgcgaaatacttagggtatttcactgttttgacacacgttttgtaggcctgataaggcgtagccgccatcaggcaataacaacaaatttaaagggaactgaagatggcaactccacatattaatgcagaaatgggtgatttcgctgacgtcgtattgatgccgggcgacccgctgcgcgcgaagcacattgctgagactttcctcgaaaatgttcgcgaagtgaacaacgttcgcggcatgttaggtttcaccgggacttacaaaggccgtaagatctccgtgatgggccacggtatgggtatcccgtcctgctccatctacaccaaagagctgatcaccgatttcggcgtgaagaaaatcattcgcgtcggctcctgcggcgctgtgcgcatggacgtcaaactgcgcgacgtggtgatcggtatgggtgcctgcaccgactccaaagtgaaccgtatccgttttaaagatcatgacttcgcggctatcgctgacttcgacatggtgcgtaacgcagttgatgcggcaaaagcgctgggcgttgacgcgcgcgtaggcaacctgttctccgctgacctgttctactctccggacggcgaaatgttcgacgtgatggaaaaatacggcgtactgggcgtagagatggaagcggcgggtatctacggcgttgcggctgaatttggcgcgaaagcgctgaccatctgcaccgtatctgaccatatccgtacccacgagcagaccactgccgctgaacgtcagacgaccttcaacgacatgatcaaaatcgcactggaatccgtactgctgggcgataaagagtaagattgtgaagggggccagagcaggcccccttcatcgtttatttcgtcagcacttcccactgtaaattgctttctagcatgaccgtatcggtagcatgcgtaaattgattatcgttcaagacaggtgttaatgtcagcgtgacgttcatcattttcccactgacctgctggttattatccatcgcgatgataccgttgttattatgtagcaacagactatccagggcactgtcattgggagcaaagctcactctatcaagggtgctggcaataggataacttttaccatctactatcatctgactaacacgtacggcgagaccaccgttatttccaaaataaaatcgtcccttttcccccgctgaggcctgcacaaaaagagcaatattctggctttctgggcaactcacactaacgtgaacctcctgtgaagacatttgattccagccttgctgagaattgacgatatcatcttgcttaagccagccaaagctgacgtttggcgaagaaaacgttatttggcagtcatcgtcggcccgggctgatggggggagtagtgcggtgaagatacaacatatagcaatccccaaccatttgctgttggatttcattgacagactccctttgccgtttcataaaatgcctctttatcctgggttttctgcagcgtgtagtggatgcgacacagacgattcatatcatcatcagcggcatataacgcaggattatccccaacatcggtgataaatacgcgtccgctgtcgacagcgctgaccaaatagttatttttttcatctacaatgctggtgcctttaggtagccatgagccatccggacgctttactgccagcatcacacggcgtgtattcagcacgttgaaatccagtacccgaaaagcgctgtgcgcgacggtaatattcttaataccgtttgccagttccatactctttggtagcgtattcgcattaacctctacgcgggatttccgccattcagttagccccggaatgacggcttgcccccagtggtcagtccagattcgcccctgtggcgtggcgatttcaatgccgctttctggttcactcaggcgtgcgatagcaaaggtatttttgattgtataaggcgagaacgttatgccatgttcgtgtgcagcgatgcctccgctgaaggttgcgttatagttgcggtaattatcgccatcagtgccgccgcccacgctgagttgagtgtaatgaagattgctattgagattaccgttgaagctattttgctggttttttgcatcacgatccgcagaaatatagtaatgggtatctttactcagcgaaccattattttgtagcccgtaggttgttttatcaccttgattacgcatataagcgccgacgcgctgctcacctagtggaatgctgatgttgatgtaaaacatatcatcatcattactgtcgttatgattctcatcatcctgattaacagcgtgctgccagttagcggtaattgaggcatatttaaacgttttgccccaggaagccattatactgcgagagtcgttgtcattatccgtagcctgataagtgtaataacccagagagaaggtacctaacagattatggttccaggcaatattagcactggagctactttgatattcgtaagcatctttattgagcgcatccgttaactcacgatatccgtcgctgtagcgggcggtactgacgtcaagtctaatttccccgggcagcgccatgctggcgcgtagttcacttttcgcaccctgcagagattcgccaaaggacgctttactgcccagcattgagccggaaaacgtccatttattggttggaagccattgcagcatccctcctgccgcttgatagtcttgtgccagtacgccagacgcctgcgccagccagttttcactcagtttccaaccatcgctgatgttatagatccaggggagcgaatagtcgctggtggtatcacgtatgcgccctatggacattgttaagcctgcgggcgtgagttcgcgtaaattaaaggatactgccggcaccgtgaaggttgtcgttgagccatcggtttcaacgacgctgacgttaaggtcggtattgctgcgtatgatggggacattttcaagggtaaatgccccagcgttcactggtgcggtataaataatctgtccggactgacgaacttcaacgcgagcctggtgggttcgggcaataccgttaatggttacgccttgtgtatcctgtgccagcccttgttcagggataagctgtacgccgttgatcggcgcgccactgaatagactggagttgacgttgatctgcccaacttgcgcacgcattttttgtgcctgaaatacgtgctccgcataggtatatagactatcggtacggtattctccatcattattcgtcagcatgtagcggctgcgcagcgtccattccgcgaagtttaagccagcttcaaggtttgcctgggcatagtttcggctatcgctaccggatgactcgctgcgactggcgtacaggttatagttaaataacccggcggtgccgcctttaatcacgttgtttagcgatagtaagttattatccagagcctgtgccggaacaaaaagctccagcgattcactgtttggcagtggggtaataatcgctgagggataatcttcttgtaggctatggcaggtttctttggcgctgatattaagcgaaacgagcccgctggcgctgaggaaatcgtcatccacgcaaagctggccttctgtgtcgaaacgcgcgaccaacgaccctctatttacgccattgatctttaccatgacggtgtggctgcctggtagaaagcgcggcgcgcgggaaaaatattgtgcgacgttggggctaatgcctctggaggtgagaatacccatgtcaaaattcagctcctccgccagagctgaaaacgtcgtggttgccagtgagcaataaagcgcagttttgatgtatagcggcagttttaaatacttcacgtgctagctctcattacggcaccagcggtgaggtaaagctggggacttcaatgccgtaacggctggcaggataaaaacgtacggatgtatcagcagcaaagggcgtttttatactgacgttcaatgtttcgccgggcagaatataggtttttttaatcgtgccttcgcccccggaaggtaagaaggtaatattttgggctaaacgtacaacgtagggagacggatttttgacgttgattgtttgtccgtttctggaccaggttaataatttccaggcatcagtaacgaccggtagatttttaggacgaattaataccggcaaatcctggcgtagattaaaacctattttcattcctttatcggtagatttcggaggaataccttcaaacgtgacgcgcttatagtgctcgacggtgagcggttccgtactttccataataaagcgtagttgctgctgctggcctgcttcaacgcgaacaactggttgagtgacatccagtttcacaccattgtcgtcaggtaaatcaacgacggtggtatataacaaagccggattgctgtcggtgtttttaacattcattacgccgctgtgtgtggattcttcaatcaccagtagcgtagtttccggtaccatgccggcagcgttagcctgtgaaaagagtgttgaaaaaacaaaggggacgctgagtaataataatggaagtttagtcactgctggcatcagaattagtcctttaattttaatctgtctccccataataagggagacagatcaataacctttttacacggtctggatcagagatatttaagcgtgatggttgcctgaccatccagatcagtatcatcagtaatggccagcgttgcagtattctgaatagccagtgaggttttcagcgggaaaatggcgagggtatacggaaccggttcggtggtgccttttgtagcaacggtaaacatttccatattgccgtttttgataatcccggtggaagacttctgccagactgggctatcaacggttcctgagatagcgtcagattttacaccatcagcggtaacgttcgcggtatcggtataaatagagaacgcgccgatttttacaccttcggttgttttgccaacgccgtaggacattgtggtatcagatactatactattagtcatatcgccattggctatggagataacggatgcgcctgggtgggtgtccgcacggtcatcggtaatagtccatgctgctttggttgcagacggacaagagatactcagagagacatctttagtacccagttggtttacatcggttgcggaaagtgtggcgaggcggatagtaccgtaatcaaccacgccgccgccgctgagttctggggtacaaccaccaacaaccagttgaccggtgacttttaatacggcagtagtgtcagcattcacgctggttgtagcaaaggaagctgcaattgcagtaataagcaaaatttttttcattatagttccattaaagaggtgttgaatattccatgtgaatgctggagttacagatatacgagtgtaaaggtcgcctgaccatcaagcgtggtgttatcggtaatagccagtgtgtccgttccctgtatagcggcagctacgcgtataggaaatgttgcggtggtaaaagcaacggggccatttccatcgccgacactatatgtagtgcgggttggaaatgtatttgtaagcgcaacgtattcgtttgatgctaaagcccagacaccaggattcgaatcatttgacgctaccatcttcgtcttaactccatcggcggtcgaattattcgcgtctatggagaggccgtatgcaccaatcttgataccatctgctgttgtacccaggcctagctgatagtttggtattctattgttctgaccgccaaatgttgcgttatcgatagtcagcgttgtcgccgaatcgccatgattgtcggtagcgacccagccaacttttgccggtgcaaggcactgaatcgtgagtgttatatctttgtatcccagttgattcgtctgagttggcagcagatcgctaacggccttagtaccgaaatctacaacgccaccatcacttaactctggtatacatgcgccgttggttaaaacgccagtcagttttaatacagcagtggattcaaccgcttgcgctgaagttgataatcctattatgacagaggtcgctattaataattttttcatcagtaatccctaacgattaagtatatttccaaatgacatgtaatgcgcgggtcgggattctatgaagataatgatatgttgtaaatttaataaaattaaatcttggttaagaaaaactttaatcatcattggtgatgataaatggtttataattcgctgggtttatgaagtgcggggaaataatattaattttaaagaatatagtagttagtgagtgtgttttaactatttgtgctattcactcatttttcagaatatgttgttatgtttaaataatatcagagacacattcgtctctctgatattattcatttagcgcacagcttctgcaatccacgccgacagttcccgcagttctttttcctgctccgggaaatcaaccagtagcgcctcgcacgtttcctgtagtttatccgcgcggtacaaacacccttgcagccgctcggccagcgcttccagcggtgccgggttcaggctatcggtaaatgcctgtgcgcgggtaatcacacctttctcgacgtcaaaatgcagctcgacgccgccccaggtgaaacgctcgtccagcagatggctgaacgctggtgcctggccgaaattccactcccaactgctctggcgcgcaaaggtttcggcaaaattcggcagatccggcgttttatccggtgaaatcacttccgcgtcgacgcgttcgccgtaatgggcgaaaaaggcttccgtgaccgcctggcagacctgttcatgggtgatacccggtaatagctcggtaagattggccacgcgggagcgaacggaggtgattcctttcgccgcaagtttctttttatcgggattcagatagtttgccagacggctgaggtctgcattcagcagcagcgtaccgtgatggaagccgcgatctttggtttcgcgataggctgaaccggagactttgcgatcgccgtccggcgtttttacgaccagatcgttgcgtcccgaagcatcggccatgacccccagcgaattcagcgccgcgagcacaatatgggtggagatggttttatcgtattccggtttaccagccataaaggtaaagcaggtattaccgaggtcatggaataccgcgccgccgccgctgctacggcgggccagacggacattatcttcttccatacgccgcgtattacactctttccacgggttttgcgcgcgtccaatgaccaccgtatccgcgttgcgccacaggaacagcacgcgctgggtggcgggcatctggcggaaaatgcactcctcgaccgccaggttaaaccagggatcgtaagagtcagaaataagcaggcgtaatgttgtcatagtggttttccttacctttattaagccgtcattttactctttttcctcacgctcttcctcttccggaacaggcttgctggccgttagcaggaagggcgactgctgccagcgggtgcgtttaccttgtagcaaggtgcgcgtcagcaccacgcctatcgccagcgagagtagcagcatcaggcgtagaatgttggtggtgttatcgacctgctttgcttcggtggccagcgtgtgggtatccagcgttagacgcaggtagcccaatgggccgtttttcccctggataggctcgacaatttgttggttaaaatagctgcccgcttttttgccatccagcgccagcctgtcgcgcacattgacgctttcgccagcgcgagtaataagatcgccctgttcatcatagacgccggcatccagaatacggctctcttgcgtgagctgacgcagcacggcgttgatgcgattttcatccggtgtttcgctgcgcatcagcggggcgatgttgagcgtcacctggcgcgccagcgtgcgggccagctcttccagctgcgggttgcgctgtcgctggtggttttgactaaaccaggacgcgccctgcataagcgcgacgagcagtgtgagacagaacaatacaatgactgcacgatgcagccgaaatttcagttttgcgcgagccatattccacctgctgaaaatttgaggcttaatgttgccagaagcgatggttacaaggtagcctcatgcgttattttccgcggggcggttaccggcctgaacgatttacaggagctttaatgcctaacattacctggtgcgatctgcctgaagatgtctctttatggcctggtttgcctctttctttaagcggcgacgaggtgatgcctctggattaccatgcaggccgcagcggttggctgctgtatgggcgcgggctggataagcagcgtttaactcaatatcagaccaaactgggcgccgcaatggtgattgtcgccgcctggtgcgtggaggattatcaggtcattcgtctggcggggtcgctgacgccgcgtgcgacgcggctggcgcatgaggcgcagctggatgtcgcgccgctgggtaaaattccgcatctgcgcacgccggggctgctggtgatggatatggattccacggcgatccaaattgagtgtatcgatgaaatcgcgaagctggccggtaccggtgagaaggtggctgaagtgacggagcgcgcgatgcgcggcgagcttgattttaccgccagcctgcgcagccgcgtggcgacgctgaaaggcgcggatgccgatattttgcgacaggtgcgcgggaatctgccgctaatgccaggattaacgcagttggtgctaaaactggaagcgctcggctggaaaatcgctatcgcctccggcggcttcactttcttcgccgactatctgcgtgaccagctacgtctgacggcggcagtcgccaatgaactggagatcatggacggtaaatttaccggccacgttatcggcgatattgtggatgctgagtataaagccaataccttgcttcgtctggcgcaagagcatgacatcccgctggcgcagacggtggcgattggcgacggcgctaacgatctgccaatgatcaaagcggcagggttaggtattgccttccatgccaagccaaaagtaaacgaaaagacggagattacgatccgccacgctgacctgatgggcgtgttttgcattctctccggcagcatgaaccagaaatgattaacctgcccaatggcaaggcgaccgtaggccggataagcgccagcgccatccggcaacagcgttaacgaaagaggtaaaacgtggcaaaagctcccaaacgcgcctttgtttgtaatgaatgtggtgccgattacccacgctggcaggggcaatgcagcgcctgccatgcctggaacaccattaccgaggtgcgccttgccgcgtcgccgacggtggcgcgtaacgaacgtctgagcggatacgccggcagtgcgggcgtatcaaaagtgcagaaactgtctgacatcagtcttgaggaactgccgcgcttttctaccggttttaaagagtttgaccgcgtgctgggcggcggggtggtacccggcagcgccattttgattggcggtaaccccggcgcgggcaaatcaacgttgctgctgcaaacgctgtgcaagctcgccgagcagatgaaaacgctgtacgtcaccggcgaagagtcgctacagcaggtggcgatgcgtgcgcaccgtctcggcctgccgaccgctaatctgaatatgctctccgaaaccagcatcgagcagatctgcctgatagcggaagaagaacagccgaaactgatggtgatcgactctatacaggtgatgcatatggcggatatccagtcgtcgccaggcagcgtcgcccaggtccgcgaaacggcagcctacctgacgcgcttcgccaaaacgcgcggcgtggcgatcgtgatggtcggccacgtcaccaaagacgggtcgctggcggggccgaaagtgctggaacactgtatcgattgctcagtattgctcgacggcgacgctgattctcgtttccgcacgctgcgcagccacaaaaaccgctttggcgcagtcaatgagctgggcgtcttcgccatgaccgaacaggggttgcgcgaagtgagcaatccgtccgccatctttttaagccgtggcgatgaggtcacttccggcagttcagtgatggtcgtctgggaaggcacgcgaccgttgctggtggagattcaggcgctggtcgatcactcgatgatggcgaaccccagacgcgtggcggtcggtctggaacaaaaccgtctggcaatcctgctggcggtgctgcaccgacacggcggtctgcaaatgtcggatcaggacgtcttcgttaacgtggtcggcggcgtgaaagtcaccgaaaccagcgcggatctggctttactgctggcgatggtctccagcctgcgtgacaggccgttgccgcaggatctggtggtgtttggcgaagtggggctggcaggcgagattcgtccggtgccgagcgggcaggagcgtatttccgaggcggcgaaacacggctttcgtcgggcgattgtgcctgccgccaacgtaccgaaaaagccgccggaaggaatgctggtgttcggtgttaaaaagctcgcagatgcgttaagcgtgtttgacgacttataattctctgtatgtagtgatgttgtataatttgccggatggcgatgcaatgcgtcttatccggcctacggattgatacggattgatgttgtaggcctgataagcgaagcgccatcaggcagtgttatgcgatttttccagcaggaggctcttgtgtcatcgttcgactatctcaaaaccgcgattaagcagcaaggttgcactctgcaacaggtggctgacgccagcggtatgaccaagggatatctgagtcagttacttaacgccaaaatcaaaagccccagcgcgcaaaaactggaggcgctacaccgttttctcgggctggagtttccccgccgacagaaaaacattggcgtggtgttcggtaaattttatccattgcataccggacacatctacttgatccagcgcgcctgtagccaggtggatgagttgcacatcattatgggatatgacgatacgcgcgaccgcgggctgtttgaggatagcgccatgtcgcagcagcccaccgtgtcggatcgcctgcgctggttattgcaaaccttcaaataccaaaaaaatattcgcatccacgcctttaatgaagaggggatggagccttatccgcatggctgggacgtctggagcaacggcattaaagcgtttatggcagagaagggaatacagccgagctggatctacacttccgaagaggctgatgcgccgcagtatcttgagcatttagggattgagacggtgctggtcgatcctgaacgcacgtttatgaatatcagtggggcgcaaatccgcgaaaatccgtttcgttactgggaatatattcctaccgaagtgaagccgtttttcgtgcgtaccgtcgcgattctgggcggggaatcaagcggcaagtctacgctggtcaataagctcgccaatatttttaataccaccagcgcctgggaatatggccgcgactatgtcttttcgcatctgggcggcgatgagatggcgttacagtattccgactacgataaaattgcgctgggccatgcgcaatatattgatttcgcagtgaaatatgcgaataaagtggcgtttatcgataccgatttcgtcaccacccaggcattttgcaaaaaatacgaaggacgcgagcatccctttgtccaggcgctgatcgacgagtatcgcttcgacctggtgattttgctggagaataatacgccgtgggtagctgacggactgcgaagcctgggcagttcagtggatcgcaaagcgttccagaacctgctggtcgagatgctgaaagagaacaacattgagttcgttcacgttaaagaggctgattacgatggtcgctttttgcgctgtgtggaactggtgaaagagatgatgggcgagcagggataagaaccaatgcctgatgcgacgcttaccgcgtcttatcaggcctacagtttcacaacgtactggaatcgctgggtttgtaggccgggtaagcgcaagcgccacccggcattcagacatttatttggcaatacgcttgtacttgatacgcttcggctccagcgcctcggcgcccagcgtgcgtttcttgtactcttcgtattcggtaaagttgccttcgaagaattccaccttaccttcatcctgataatccagaatgtgggtggcgatacggtcaaggaaccaacggtcgtgcgagataaccatcgcgcagccagggaactccagcagggcgttttccagcgcgcgcagggtttcgatatccaggtcgttcgtcggttcgtcgagcagcaggacgttgccgcccacctgcagcagcttcgccagatgcaaacgaccgcgctcaccgccggacagttcgccaacgcgtttgccctgatcgacgcctttgaagttgaagcggcctacataggcgcggcttggcatttcagtgttgccgatcttcatgatatccagcccgccggacacttcttcccagacggttttgctgttgtccatcgcgtcgcggaactgatcgaccgaggccagcttgacggtttcacccagcgtaatggtgccgctatcgggctgctcctgaccggacatcatgcggaacagggtcgatttacccgcgccgtttggcccgatgatcccgacgatagcgcctttcggcaccgagaagctcaggtcgtcgatcagtacgcggtcgccgtaggatttacgcaggttgctgacttcaatgactttgtcgcccagacgcggtcctggtggaataaacagttcgttggtttcgttacgtttctgatactcaacgctgttcagttcttcaaagcgagccagacgcgccttacctttcgactgacggcctttcgcgccctgacgcacccactccagctctttctcaatggatttacggcgcgccgcttcggcagacgcttcctgcgccagacgctgatctttctgctccagccaggaggagtagttgccttcccacggaataccttcgccgcggtcaagttccagaatccagccggcgacgttatcgaggaagtaacggtcgtgggtaatcgccacgacggtaccttcgaagtcgtgcaggaaacgttccagccacgcaacagattcggcatccaggtggttggtgggttcgtcgagcagcagcatgtccggcttttccagcaacagacggcacagcgccacgcgacggcgctcgccgccggacagtttttcgactttggcatcccagtccggcagacgcagagcgtcagcagcgcgctcaagctgcacgttcagattatgaccgtcgtgcgcctggataatctcttcaagtcggccctgctctgcggccagcttgtcgaagtcggcatccggatcggcatacagcgcgtacacttcatccagacgtttgagggcgttaaccacttccgaaacggcctcttcaatcgactcgcgtaccgtgtgttccgggtttagctgaggttcctgcggcaggtagccaatcttaatgccgggctgcgggcgcgcttcgccctcgatatctttatcgagccccgccatgatgcgcagcagggtagacttaccggcgccgttaaggcccagcacgccgattttggcgccagggaagaagctcagcgagatgtttttcagaatatgacgtttcggcggaaccactttgccgacacgatgcatggtataaacgaattgagccacgttggacttcgcctctatgtttatcgtgatggtgaatagatgtcaaaggcgaagtgtagcctttttccctgcctaagcccagccagcagatcgcactcgcaataaaagtaaaaaagtgtccgtaacgtggcgcaaatggctatgactggttagcataaattcattacgcggcatgatgctgcattggataacaattgaggaagtgcttgtggatagagccaaaccatttgtctggcgtctcgtcgccgccagcgtatgcctgctgaccttttgtcacctcgcgcgggccgactcactggaagagcagcgtaaccgctatgcgcagattaagcaggcctgggacaaccgccagatggatgtggtagagcagatgatgccgggtctgaaagattatccgctctacccgtatctggaataccgtaagatcaccgacgatttgatgaaccaaccggcgattgctgtcacgcagtttgtgcgcgccaatcctacgcttccgcctgcgcgtacgctgcaatcacgcttcgtcaatgagctggcgcgtcgtgaagactggcgcggcttgctggcgtttagcccggagaaacccggcaccacggaagcgcaatgtaactattactacgcgaaatggagtaccgggcaaacggaagcggcctggcagggcgcgaaagacctttggctgaccggcaaaagtcagccgaatgcctgcgataaactgttcagcgtctggcgggcctccggcaagcaagacccgctggcgtatctggaacgtattcggctggcgatgaaagccggaaatacggggctggttacggtgctggccggacagatgccggcggaatatcaaacgatcgcctcagcgatcattaccctcgctaatgaccctaataacgtgttgatctttgcacgcaccaccggcgccaccgattttacccgccagatggcggaagtcgcgtttgccagcgtcgcccgccaggacgcggaaaatgcgcgtctgatgatcccctcgctggtacaggcgcagaaacttaatgaggaacaaacgcaggcgctgcgcgatatcgttgcctggcgactgatgggcaacgatgtgaccgatgcgcaggcgaaatggcgcgatgacgcgattatgcgctcgcaatcgacgtcgcttatcgagcggcgcgtgcgtatggcgctggggatgggcgatcgtcgcggtctcaatacctggcttgcccgcctgccaatggaggcgaaagagaaagacgagtggcgttactggcaggcggatttattgctggagcgcggtcgtgacgccgaagcgaaagagatccttcatgctttaatgcagaagcgcggtttttatccgatggttgcggcgcagcgtttaggcgaagagtacacgcttaaaatcgataaagcgcccgccaacgtaaacagcgcgttgacgcaggggccggagatggcgcgtgtacgggagctgatgtactggaacctggataacacggcgcgcagcgaatgggcgaatctggtaaaaagccgtagtaaatctgaacaggcgcagttggcgcgctatgcgtttaaccagcactggtgggatctgagcgtacaggcgacgatcgccggaaaactgtgggatcatctggaggagcgtttcccgctggcgtataacgatctttttacccgctatacccgcggaaaagatatctcacaaagctatgccatggcgattgcccgccaggagagcgcctggaacccgaaagtaaaatcgccggtaggggccagcggcttaatgcagattatgccgggaacggccacccatacggtgaaaatgttttcgattccggactaccgcggccccggccaactgctggagccggagaccaacatcaacattggcaccagctatttgcagtatgtctatcagcagtttggtaataaccgtattttcgcctcggcggcgtataacgccgggccggggcgcgtgcgcacctggcttggcaatagcgccgggcgtatcgatgccgtagcgtttgtcgaaagcattcccttttcggaaacgcgcggctacgtgaaaaacgttctggcctatgacgcttactatcgccactttatggggcagaaagaggccttaatgagcgactctgagtggcagcgacggtattaatgcagacgggttatgttatcatttgtactcgtgtaacagtacaaacggcggtataacatgacccagcattccccttattcatcggctatcgccgaacaacgtaatcaggagtggcttcgttttgtggagttactccgtcaggcatatgcagaggatctgcatctgcctttattacaactgatgcttacgccggacgagcgtgaagcgctgggaacgcgcgtgcgcattattgaggagttgttgcgtggcgaaatgagccagcgcgagttgaaaaccgagctgggggcgggcatcgccaccatcacgcgcgggtcaaacagcctgaaatccgcgccggttgaactgcgtcattggcttgagaacgtactgctgaaaaacgcctgatttgctcgtaggccggataaggcgaagcggccatccggcaacatcgccgcgaaatgcctgatggcgctgtgcttatcaggcttacaatatagcgcaaataattatcgatacaccgcgttatgaaacgggctgagcgccaggatcaccgcctggtagtaaacgctggagcgcgttaattttccggcggtaaatacgccaatggcgccctctttacgaccaatctcatcaatacctgtgtactgcgacattaccgggccaagcgcttctccctggcggactctgtcgagaatgacggcgggcagcggtagcgtggccgatcgcgcttcaccgcgctgaacgccgttatcaatcaccacccaactgaaggtggcgtcatcgtcaattccggcttcaatggctacccagaaatcagcttgtggatgcaggcgtcgcgcattatccacgcgatttcgtgcgccagcacgcgtttcctcgcttccgaagggctgctccggtacgccgctctcgacggcgacgggcgtaatatggcacgatccttcgccgaaaatctcttcaaatgcctgtagaattgcctgaattttggcaggattggtggtcgcagagataacctggtgcataattaagctcagttttaaaaatttatcgcagtataacggaaaaaaaacatgttacaggtataccttgttcgccacggtgaaacgcagtggaacgccgagcgacgtattcagggccaatcggacagtcccctgacagcaaaaggcgagcagcaggccatgcaggtaggagaacgcgcccgtagcctcggcatcacccatatcatcagcagcgatttaggccgcacaaaacgcacggcggagattatcgcccaggcgtgcgggtgtgatatcacctttgactcccgcctgcgcgagctggatatgggcgtgctggaaaagcgccagatcgattcgctgacggaagaagaagagggctggcgtcgtcagctggtcaacggcacgcaggatggccgcattcccggcggggaatcgatgcaggagttgagcgatcgcgttcatgccgcgctggcgtcctgtctggagctaccgcagggcagccgacctttattggtcagtcacggtatcgcgttgggctgtctggtcagtactatactgggactacccgcctgggcggaacgccggttacgtttgcgcaactgctctatttcccgcatcgattaccaggaaagtcagtggctggcgtctggctgggtggtagaaaccgcaggggacgtttcgcatctggacgcccctgcattggatgagctacagcgttaacggcgaatcgggatcagaaattcgcagcgcaggttgatagggcgatcgccggttttggtatcttctgacgggtagtatcgctctatatcctgtcctttacgacgggtcagattcagcattggcatacaggtgccgtaaacggtcaggataaaatcctgcacgccggttcctaacccttcataggtgaacatgacgtattcaccaccctgcaacagcacgggatgcgccgactgaacatagccatcggcctgctcttgcggcagtgcggtggtatagaatacttcctgctcatcgtctttctccatgctggggcgcgtttcattaagcccataaagcactggcggaatagttggcgaatgaccgaggaaatcatgccagaattgcacgcgcatttcgtggcggaagtcggaaatctgttccagcgagcaggaatagctctgcgtgacgccaaggagcggcgtatcttccagcgtaacgaactgatgttccggcacggtaaactcgcccagccgtaatggcgggcgaatgccaaaggcgctccattccgaggagcggcgatacagcgctggcgtctgggaaaactgtttcttaaaggcgcgcgtaaaggtttgctgagaatcgaagcggtactgaagagcaatatccagaattggacgcgcggtcaaacgcagcgccactgctgatttcgataaacgacgggcgcggatgtaagcgccaatggcgtggcccgtcacgtccttaaacattctctgcaggtgccacttggaatagcctgcttttgccgccacattgtcaagtgacagcggctgatccagatgaccttccagccagattaacaggtcgcgaattatgccagcctgatccataaaatatccccatcctttcaacaacgagcacccgatatcaggtaagaggataatagcattttttgttcttttagcattcagtgttttttttgagcttaaatgctttttttaggcaacgtgacaggtaattattctaatcctgtgatctataaccattttattttagaatgtctaataattacgcaacgtaacttttatgaatggtaacaatatgaaatacaagagcttagtacttttctcaattttgttgctgctggggcagagcgcccgcgcggaacaaattggttcagtcgatacggtatttaaaatgttcggtcctgaccataaaatcgtggtggaagcttttgacgatcctgatgtcaaaaacgtgacgtgctatgttagccgggcgaaaacgggcggcataaaaggcggattggggctggcggaagatacgtctgacgccgctatctcttgccagcaggtcgggcctattgaactgagcgacaaaattaagaacggcaaggcgcagggagaggtggtgttcaaaaaacgcacctcattgatatttaagtcattgcaggtcgtgcgtttctatgatgagaaacgcaacacgctggcgtatctggcctactccgacaaagtagtcgacgggtcgccgaagaacgccatcagcgcggtgccggtcatgccgtggcgacaataacagggaaagagtatgcagcaaccgcaggtctggttagtcgaggatgaacagggaatcgccgatacgctcatctacaccctgcaactggaagggtttaccgttgagctattcgctcgcgggctgcccgcgctggaaaaagcgcgtcagcaacggccggatgcggtgattctcgatgtgggactaccggatatcagcggctttgagctgtgtcggcagttgctggaacgccatcctgcgctgccgattcttttcctgactgcccgtagcgatgaagtggatcgattgcttggtctggagattggcgcagatgattatgtcgccaagccgttctcgccgcgcgaagtgagcgcccgcgtgcgcacgctgctgcgccgggtgaaaaagtttgctgcgccgtcgccggtggtgcgtaccggacattttgaactcaatgaaccggcggcgcagatcgcctggtttggtacgccgctctcgctgacgcgttatgagtttctgctccttaaaaccctgctgctgtcgccggagcgcgtgtactcgcgccagcaattgatggatattgtctggtctgatgcccaggagaccttcgatcggacggtcgatacacacatcaaaaccctgcgcgctaaactacgcgcgatcaatccggagctctcgccaattaacacgcatcgtggaatgggatacagcctgaggagcgtctgatgcgcatcggaatgcgtttgctgctgggctactttcttattgtcgccgtcgccgccgtgtttgtgctgtctatcttcgttcaggagataaagccgggcgtccgccgcgcgacggaagggacgctgattgacaccgcaacgctgctggcggcgctggcccgcgacgatctcctttccggcaacccgactgacggccagttggcgaaggcattcgcccaactgcaacatcgcccgtttcgcgccaatatcagcgggatcgtcaaagtgcgcaatgaataccatatctacatgacggatgcgcaggggaaggtgttgtttgattcggaaaacaaagcggtggggcaggattattctcgctggaatgacgtctggcttacgctgcgcggacagtatggcgcccgcagcacggcaaaagatgctgccgatcccaatagcaccgtgatgtacgtagccgcgccgataatcagcgatggacggattatcggcgtcctgactgtcggcaaaccgaatgcggcaatggcgccggtgattaagcgcagcgaacggcgcattctgtgggccagcgccgttttactgggaattgcgctggcgattggcgcggggatggtctggtggattaaccgctccatcgcccggttgacgcgctatgcggattccgtcaccgaaaaccgcccgcttgcgttacctgcattaggcagcagcgagctgcgtaaactggcgcaggcgctggagagtatgcgcattaagctggaaggcaagaatgagattgagcagtatgtgtatgcgttgactcatgagctgaaaagtccgctggcggcgatacgcggcgcggcggagattctgcgtgaaggaccgcccgcggatgtggttacccgctttacagagaatatactggcgcaaaatacgcgaatgcaggcgctggtagaaaccctgctgcgccaggcgcggctggaaaaccgacaggatatccctctcgcgccggttgctgttgatgagctatttacgcagcttagcgaggcgcgcagtattcagttggcggcaaaaaagatcacgcttactctacggccttcctcgctggttgtcgtcgccgacgcggagcttctggcgcaggcgttgggcaatgtgttggacaatgccatcgactttacgcctgaaaatggcgttatcacattaagcgctcagccgatgggggagaaagcgatcctgcaggtgacggattccggctgtggtattcctgattttgcgctgccgcgcattttcgaccgattctattcgttgccccgtgaaaacgggcgtaaaagcagcgggcttgggctggcgtttgtcagcgaggcggcgcggctcctcaacggtgaggtgacgttgtgcaatcgtcccgaaggcggcgtgctggcctcgttgacacttcaccgtcacttcacataacttcaaattctccccacatcgcgttcttacactgctggcattgcaaaggagaacgctatgttgaaatcccccctgttgtggaaaatgattacgttaggcggcgccatgatcctgctgttaattcccctgatgatggtacggcacaccatcgtggagcgtgctgattatcgaagccatgtagaagccgctattcgtcagagtaccagcggcccacaaaaggttgtcggcccgctggtggcgattccggtgacagagctctataccgtgctggaagaggagaaagaggtccagtataagcgcagctatctctatttttggctgccggagtcgctattggttgaaggcaatcaaaacgttgaagcgcgaaaaataggtatttatcaggggcaggtgtggcataccgatatggcgataaaggcggagtttgatgtggcccgtctgcatgagctgaacagaccgaacattacccttggaaagccctttatcgtcgtgggcgtcggcgatgcgcgcggtatcagcgcagtaaaagcgccgcaggtgaatggtgaaacgctcactgtagagccggggaccggcttaccggaaagtagagagggcattcatatcccgctgccggacagtcagtgggcgacgcgcaacctgacgttggatatgtcgctaaatttaagcggaaccggcagcttttcactggttcccgtcgggcgtagcagtgaaatgaccctggccagtaactggccgcacccaaattttgtgggggattttcttcccggtaaacgcgaaatcagcggttcaggatttcaggcccagtggcaaaccagccggtttgccacgaatctcggcgaacagtttgctgatgcgcaaaaggtggattgggacaacttaccggcgtttagcgtcgctgtatcgacgccagccgatcagtatcaactgacggacagagcgacgaaatatgccattttgttgattacgctaacgtttatggcgttctttgtcttcgaaaccctgacggggcagcggttacacccgatgcagtatctgctggtggggttatcgctggtgatgttctacctgctgttgctggcactgtcggaacatatcggtttcacgccagcctggatcgccgcaagcctggtgggcgcgttgatgaatagcgtttatttgcaggcggtgctgaaaggatggcgcaatagcgtgctgtttacgttagcgttattggcgctggatggcgtgatgtggggattgctgcgttcggaagatagctcgttgcttctgggtaccggcgttctgctactggcgcttggcggcgtgatgttcctgacgcgccatctggactggtattcgctctcttgtcagcaacgtaagtcattaccgccagtaaaagatgacgaattacgtttgtggaaataaatctaacgggcgcgcgcgttaacgttttcccgcgcagcgccagaaactgtgatgccgttagttataggtcaggtttaatgttgccgtggcattcgcttgcccggccgttaccgtggcggcggttttatagtagcgcgcgctaattttcagggtggtcgacatattcatggttccgccgttaaccgtctggctgccatcggcattggtggtaatcgtgtgagtaaagagatcaattttttgattgattggcaaactgccggtaaagaaaccggcgtccggcgcctgaatacccaactgtacgccaacgccggttgcgctggttggcgcgctcgcattgctcaactggatgactgaattatcagggttatttccgctggccggttgggcgcttaacgatgcggaaatagcggtgccttgttcgcaggtcaataggatatcctgctcgcctgtgcccgcggtttgactgttagcgaaactgcctaaattgacgctgcctaaatccacggtgatggcaggtgtttctacccgacatcccatcgctttcataatcaattgcgtattccccaaatacagatgggtcaggatatcgccgccggagtcttccgttgcgctatcgcgaaaagatacgcgcgccagtgggctttggaatgtcgcggtaccggaggtgatcggaccgcctaaggcgaccagttcaacattgtaggcgggagccatcgcatggtgtgttttattgccatcgccattatggtaggtattatcgattggcatgacattatcgtaagggccagcattcgtttgggttttaatcgcaacgcccacgccggaaatcccggtgctaaataccggcgtgttgttcccgtcattcgcattgattgtcgctgatgtatttgactgcgcgctaccgggttcatataaaaaaccgaccttataatcgcgactacagccatccattgtgacttcggaggtggaaacccagcccgattgccacaacacctcgcctgcggtataggcgtggctatccaccacaagctgcgacggcggggtgatagtgatcgcgccttcattaccggaacgtttacaggaggcgtaactatgaccggaatacgcgaacagcagaataagcgccagatataaccttctcatgaaaaattcctgcttttataccaggtgaaatagaaagatgttattgccatgcaatagtgatcgtcacaacggacgtgaaatcccctgccgtgacttttccgtgcggggtatacatccttgcggcgacaggcaaattggcttcatgggtattactgttgatatccaccgtgtaagtgacgttgttggccagattgaccagacttttaccgtccaggttaaaaagctgtaatcctaaatcctgcgccggattggccgcgctgtttgcataaatcgcagaagcataatttggatcgggataaggtacgccgttaaatgaaatcgcggcttttgtggtcgttgccgggcaattcgtcatttttatggtgaaaggaatggtggcggtattgccaccggccacggcgatatccgcccgggcatattgtccaagagagagcgtgtcggggaccgtcacggtacacggatcggcataaattaatcccgtaacgttaatgcctacggcatctgcggtattgtatgccgcgctgatcgagggcgaccataatgccagacccgtgaacgttaacagggcggctaatgcagcaaatctgttcatattcatcttttatcccaccagaatcactggcattgctcgtgtaagatttctacgccagaagcggagggggagctcggtatacgataagagacctgacactggtctgctgctgttggtccccacttcactaataaccgcccttgtttttccagtccggttaaccaggcctgccccgcatcaccaacaaaactgctgtgattgtctggttttgttaaagacgagacggtcgcgccaaaaggaacaggaagattgtttatgcgggttaataccatcaatgccttgtaaccaatattggttttatattcagccctgaccaccgcgccacgggtaggcaccagcgttttactggtatcaatgagctcaatattttttctaatgcccgtcgtatctaaagagacttcattacgatggtaaggcgaagcataaggtacgacggcataaccccgaaaatcggtgtccacgcccgtttcgttattcacggggacacccgctgcgccaggggctttaaccaatatgatggtgtcgtccattggctgggatagtgtcaggccatttcgatgtaacagtacgccgacctgaacgccataattcaggcgacgcatatgattatcgtagctatatccgccgttaatatccgcatacgtcccgttataggttgcgctcacattaccgctggtggctttctcttgagaggaataaccttcctgaacgctccatgagagatttttctgtgccagcgctgttccgtttaaaccgacagtatgcgtggtatcgccgtctttcgcggagttcatattgtaggtggcatacgttgacggcataaaggcatctaacggaatactaatattgattgaaatttgctggtcattactgtcttccgtatcgtcgtcttcatcctgagaattatcggcgttcagcgtataagaatagttaatgccatagcttacgttatgccatgtgttgttatagccaatacctaatgatgtggtatgagtgtcattccagtaatcttcattatataaagtgagtgaaatggaaccgtagataatgtcttgcgataacgacaggtcggtgcgattgcggacatgatcatagtgactattatcgctataggtatccagcacatcctcaagagcgtagtaatctttggtcgaataacggtagccggcgacagtgaaattggtgcctgttgactgaatatctttgctgtaacgaatacgccaggattgtccggtaagcgtatcgctaaccacatcgcctgctttaatttttgaccatgagttggtgacgtctaaagacaatgcgcccagatcgccaaggtttaagcctgtcccgatgagcgccgcatgataaacatcattgctcagcgtactctctattccgccataggcggttatgccgcctgctaatccgtataaggccgtcagttcagcgaagttctgttgcgcggaatgcgtatctgatgaacgcgtgcggcctaccgtcaggtcgtatttcaggtggccttcacgctgtaataccggaacgctggcgtagggcacaatgaaatgctgttcagaaccatcggattctttgatggtgacgtacaggtcgcccgaaccgccggttggataaagatcgttgatggcgaatggacccgccggaacgttagttttgtagatggtataaccgttttgttcaacggttacctgcgcgctgcttttggccaccccgcgaatgaccggggcgaaccctttcatactgtccggcaacatatcgtcatcagaagagatctgtacgcccttaaatgaaatactgtcaaagacgtccgcgggcgtgttattttccccggcgatcagctgtccttttaaaaattcgatatcgcgagaaacataggtgtaggcagaatcccagctattttgcccatcgctatcatgattccaggttgagtagttacgaaaacgccatgcgccaatgttaataccagggcgcaggttagcgtattcgctattttccgtccggttttcatcaatatcgtgatcctgcgatccggtaaaactgtagttcagcaaaaaagcattaatgccttcatcccattcgctggtagggacgaattctcgcgggtcggcgatcaacgcgatttgagggatcgctaaatccagccggttaccgatgacattaaactttgctacagcgccagccagcagactaagatcggtacacccgtttgggtcatttttaagctcggggaagttttctgtttttacgccccactgcttgagttgttcaacgctaagacacggctgtagggagagcttattatctgctgattttttatttttaaaggcaatattttttgtttcaacactggtgttattaatataaatatcaacattataggtgccttctgcctgcccccccttttcgaaaaccgatagatcgacattctccacgcccggttcatcattttccaacgataatggattaaaatgatcatgcgctaacgctggttttatggaacagcatataaagagaaacgataacgctaattgagaacggggctctactctggagaattgcacagtaaaagtcctgaaagggtaaaagtaaaatgaagtcgttaatggctagaatgaaccggaatgcggctctaaactcatcccataatcgctgattaatcgccacgttaccgtgccatgaggggcggcagtagaacccaatttaaatgacgctgatgattttggcggaacgaaggtcgctgatttcacttcatggctgttaagcgtcacactggcaaagttcatataatagggagtggggttatttacggtaataacatcacctgccgtctgccattttaattgttggctctggctatcaggcgttgattttgttaatgctggcggtcgatatataagctttatttgggtattaatggagatttccacgcggttcgcggaggcattatcatcaatagaaggaatacccttaatattgagccagtacatagactcccgatctgcaggtaggggggcgccagagcgaataacccgaatactgttcttttgcccggcatcaaggcgaaaaagaggcggggtgataataaacgcctgcttatttgtgacctggggatcggcaaccgataaccatgactgaacaagattcgctttgctgtctttattctctacattgattgacgactcatcattattgccgtcgaaaaccagtcgggttccgccaacaacaatgctggcatgggcaacatggcttgtcagtaatacggccaacacggatttctttatgtgtttcattttttactctgtaaagatgttttacgctatggactggcatcctgcctgtccacatcaggatgagaatgccttactgatacgaaacggtatacgtaacctgagtgctaacatctccaccggttacggttgcggaaccatcgtttgccatggcggcgtaataggtaaagtctgctgtcgagccgtcggttggcaggtttactgcggcatcatccgtgttatctgtcacatcgctatgtgaagcgttctgaatagaaataccgacacccgcggcgcccgtttccgatccttcgtccgcgtttttgaagtacgttgggttagaatcatctgttgcgccgtggaagcggaacatggcttgggttggtacgccagtccctgcttccgggcagctaaccaggcttacggtaaacggcacgtaatcggttgtggcgcctttttccgcgatgcgttctttgctgtaattacccaaatcaatggtggtatccgtggagccattcacctgaaccgtacacgcctgatcgtaaattttgccattgaacgtaatcgtgttctgggcaaataccggtgtggatgctacggcagttaacattgccaggatgattattttcttattaaacatattaattgttgcctgattctattcgctgaaaaataaagatagccatataaaataaaatattatattttactctgtatgcgcttctttctgttctgtagataagcaggcggctattctacgtatatcaactatgaactcaataaaaattctgatgcaatattgaacggcagtccagtttcggacccggtaacaaagtttaataaaataccactaaagaagtatggttgatgactggatttatagagcaagatctcttttttgataatagttattatttcctggaggatttatttaactctatattgctttatttttaataatatacgacgcttgtccgtttaaaatgaaaccggcaggtttcgaagctctaacagtcttccatgcagtatttttatatagtcccccgcttttagttctgaaagtacctgcatgatacggctgcgtgaaagcccggttctctgctgtatgaagttctgtgcattgatctcaaatcgtgagctttcaggatacgaccacagttcaagtaacagcgcttttatctggctataggcgtcctgcccgataagatttctgtcacggttagtcatgaaagcaatgcggtacatcaggatgttcgaaatgtcacgccagagatgcttttcatcagctatttccacaaaatcttttactgggacaggataatattcacaggtggtttcggcgataaaaaagacgtctgaattctcttctaactggtataagtcagcataggcatctacaaggcctaaaatcattggtgagacaccgcagcccattacaatgctgtcgatacgccgacatactttaatagcgcctttagtgattaacaggatgtgggattgattatcaatcttgatatccagtgttttaccggctgtaatagtgacaggggagatgttttgaataacgtgccgatgaatatttaaaatggcttgcaggtttttttctttccctgtgggacgatacacattcccgccgtttaactgcttcatatcttccccattattatggctgataaagtggttgactattaaaaggtaaacataaatttaatattcacttaaaattataattaagtaaattaaaatagccaacaagaatatttaagtcaatgtattcaccttatcaatgcatgagcgacaacgctgtttgtaaggttaaccatagtaaatgtgatgattttatttgcaatcattttatgacagctatcataggtaccgtgcttaacgagcgcgtagagcgtacaggatagcgaagcgatgaacatcgctattggaggatacgaatgagagaaaagtacaaaatgcaggcgggcggcgttttactgagcgaaatcgccgcctgccggaactcctcccggcgggagccataagcggttagcggtactggacgatcaggctttgaatctccggatgatcttttaacgacacgtgccgtaccgtggcgattccattcatcaacgaaatagcgtttccagacggtgtggcgactgtctgcaaatgggggatattattccgcaaacatgatacctcgatattgcgatcgtgaggcgcaagattacaaccatattcgacaatctggcctttgaaatgaataacgcctgcggagaccggcgcggtagcagccagcgcggctgatgaagctgacatcgctgcacaaaacaggtagcagcataatggtgattttttcatcctttgaaacctcacgtcctgtgagcatccccttattttttggggactaacaaatcccgtgtattactctttaatgtaaatacacaaactaccttaactttcgcaagctgagataaacagcgctatacgacaatttttatgtaaaagagtacgtcataacggcaggtcaggagggaaagcgaggccgcttagcggaagggggacataagaaacagccagtaagaataacttaccggctgtttttacagtttggcgcctgggccgaattaatcctgcaggtcgccgcagaagcgataaccttcgccgtgaatggtggcgatgatttccggcgtatccggcgtggattcgaaatgcttacgaatacgacgaatggtaacgtcaacagtacggtcatgcggcttcagctcgcggccggtcattttcttcaacagctctgcgcgcgactgaattttgccagggttttcgcagaagtgcagcatcgcgcggaactcgctgcgcggtagtttatactgctcgccgtccgggccgatcagtgaacgactgttgatatctagttcccaaccgttgaacttgtagctttcaacgctacgacgctcttcgctgacggtacccaggttcatggtacgggacagcaggttgcgggcacggatggtcaattcgcgtgggttaaacggtttggtgatgtaatcatccgcgccgatttcgaggccgagaattttgtcgacttcgttatcgcggcccgtcaggaacatcagcgcaacgttagcctgttcacgcagttcacgcgctaacaggagaccgtttttccctggcagattgatatccatgatcaccaggttgatgtcatattcagagaggatctgatgcatttccgcgccatctgtcgcttcgaatacatcatagccttccgcttcgaaaatacttttcaacgtgttgcgtgttaccaactcgtcttcaacgataagaatgtgcggggtctgcatgtttgctacctaaattgccaactaaatcgaaacaggaagtacaaaagtccctgacctgcctgatgcatgtcgcaaattaacatgatcggcgtaacatgactaaagtacgtaattgcgttcttgatgcactttccatcaacgtcaacaacatcattagcttggtcgtgggtactttccctctggacccgacagtgtcaaaaacggctgtcatcctaaccattttaacagcaacataacaggctaagacgtaccggacacctaataaaactacgcttcgttgacatatatcaagttcaattgtagcacgttaacagtttgatgaaatcatcgtagctaaatgctagctttcatcacaaatttgcaatattccaactagttacgtaagccaactaataaatgtgatgaatccaaagaacaggatctattttaaattaaattatcctaaataaacagtaggataacgatgttctgttaacataaacagcaatagtacagatacgcaatagtgtagcgtcttttacgaaatcaaaaatgctttttcagtgatatcagttaaaattttgtaaatttgcgaagcgtaatatgcttacaaacgccagctaatttcctgtaaattagtcaaaaagagtaatgaaatgcgtgtaacaattgttcttgtcgctcccgccagagcggaaaatattggcgcagccgcccgggctatgaagaccatgggatttactgacctgcgtattgtcgacagccaggcgcacctggagcccgccacccgttgggtcgcacatggatctggagatattattgataatattgaggttttccacacccttgccgacgcactccacgatgtggattttaccgtagcgacgacagcccgcagccgggcaaaatttcattactacgcttcgcacgctgaactggttcccttattacaggaaaaatcacgctggatgcgtcatgccgcgctggtttttggccgtgaggattccggtctgaccaatgacgagctggcgctggcggatgtattgaccggcgtgccgatggcggcggattacccttcgctcaatctgggtcaggcggtcatggtgtattgctatcaattagcaggtttaatgcaacagaccacagaatccgttgatattgctgatgaatcgcagttacaggcgttacgcgcgcgccttttacgcctgctaacgactctggaggcggccgatgaccacaaattaaccgactggctacaacagcgaatcggcctgctgggacagcgagatacggtaatgttgcaccgtttggtccatgatattgaaaaaaaactaacaaaataacgtgctgtaatttttaaaataata
